(19) United States
(12) Patent Application Publication
(10) Pub. No.: US 2022/0119781 A1
(43) Pub. Date: Apr. 21, 2022

(54) MODIFIED TERMINAL DEOXYNUCLEOTIDYL TRANSFERASE (TDT) ENZYMES

(71) Applicant: Nuclera Nucleics Ltd., Cambridge (GB)

(72) Inventors: Michael Chun Hao Chen, Cambridge (GB); Gordon Ross Mcinroy, Cambridge (GB); Sihong Chen, Cambridge (GB); Ian Haston Cook, Cambridge (GB)

(21) Appl. No.: 17/428,003

(22) PCT Filed: Feb. 4, 2020
(86) PCT No.: PCT/GB2020/050247

§ 371 Date: Aug. 3, 2021

(30) Foreign Application Priority Data
Feb. 4, 2019 (GB) 1901501.5

(51) Int. Cl. C12N 9/12

(52) U.S. Cl. CPC C12N 9/1264; C12Y 207/07031

(57) ABSTRACT

The invention relates to engineered terminal deoxynucleotidyl transferase (TdT) enzymes or the homologous amino acid sequence of Polμ, Polβ, Polλ, and Polθ of any species or the homologous amino acid sequence of X family polymerases of any species and their use in a method of nucleic acid synthesis, to methods of synthesizing nucleic acids, and to the use of kits comprising said enzymes in a method of nucleic acid synthesis. The invention also relates to the use of new terminal deoxynucleotidyl transferases and 3′-blocked nucleoside triphosphates in a method of template independent nucleic acid synthesis.

### FIELD OF THE INVENTION

[0001] The invention relates to the use of specific terminal deoxynucleotidyl transferase (TdT) enzymes or the homologous amino acid sequence of Polμ, Polβ, Polλ, and Polθ of any species or the homologous amino acid sequence of X family polymerases of any species in a method of nucleic acid synthesis, to methods of synthesizing nucleic acids, and to the use of kits comprising said enzymes in a method of nucleic acid synthesis. The invention also relates to the use of terminal deoxynucleotidyl transferases or homologous enzymes and 3′-blocked nucleoside triphosphates in a method of template independent nucleic acid synthesis.

### BACKGROUND OF THE INVENTION

[0002] Nucleic acid synthesis is vital to modern biotechnology. The rapid pace of development in the biotechnology arena has been made possible by the scientific community's ability to artificially synthesise DNA, RNA and proteins.

[0003] Artificial DNA synthesis allows biotechnology and pharmaceutical companies to develop a range of peptide therapeutics, such as insulin for the treatment of diabetes. It allows researchers to characterise cellular proteins to develop new small molecule therapies for the treatment of diseases our aging population faces today, such as heart disease and cancer. It even paves the way forward to creating life, as the Venter Institute demonstrated in 2010 when they placed an artificially synthesised genome into a bacterial cell.

[0004] However, current DNA synthesis technology does not meet the demands of the biotechnology industry. Despite being a mature technology, it is practically impossible to synthesise a DNA strand greater than 200 nucleotides in length, and most DNA synthesis companies only offer up to 120 nucleotides. In comparison, an average protein-coding gene is of the order of 2000-3000 contiguous nucleotides, a chromosome is at least a million contiguous nucleotides in length and an average eukaryotic genome numbers in the billions of nucleotides. In order to prepare nucleic acid strands thousands of base pairs in length, all major gene synthesis companies today rely on variations of a ‘synthesise and stitch’ technique, where overlapping 40-60-mer fragments are synthesised and stitched together by enzymatic copying and extension. Current methods generally allow up to 3 kb in length for routine production.

[0005] The reason DNA cannot be synthesised beyond 120-200 nucleotides at a time is due to the current methodology for generating DNA, which uses synthetic chemistry (i.e., phosphoramidite technology) to couple a nucleotide one at a time to make DNA. Even if the efficiency of each nucleotide-coupling step is 99% efficient, it is mathematically impossible to synthesise DNA longer than 200 nucleotides in acceptable yields. The Venter Institute illustrated this laborious process by spending 4 years and 20 million USD to synthesise the relatively small genome of a bacterium.

[0006] Known methods of DNA sequencing use template-dependent DNA polymerases to add 3′-reversibly terminated nucleotides to a growing double-stranded substrate. In the ‘sequencing-by-synthesis’ process, each added nucleotide contains a dye, allowing the user to identify the exact sequence of the template strand. Albeit on double-stranded DNA, this technology is able to produce strands of between 500-1000 bps long. However, this technology is not suitable for de novo nucleic acid synthesis because of the requirement for an existing nucleic acid strand to act as a template.

[0007] Various attempts have been made to use a terminal deoxynucleotidyl transferase for de novo single-stranded DNA synthesis. Uncontrolled de novo single-stranded DNA synthesis, as opposed to controlled, takes advantage of TdT's deoxynucleoside 5′-triphosphate (dNTP) 3′-tailing properties on single-stranded DNA to create, for example, homopolymeric adaptor sequences for next-generation sequencing library preparation. In controlled extensions, reversible deoxynucleoside 5′-triphosphate termination technology needs to be employed to prevent uncontrolled addition of dNTPs to the 3′-end of a growing DNA strand. The development of a controlled single-stranded DNA synthesis process through TdT would be invaluable to in situ DNA synthesis for gene assembly or hybridization microarrays as it removes the need for an anhydrous environment and allows the use of various polymers incompatible with organic solvents.

[0008] However, TdT has not been shown to efficiently add nucleoside triphosphates containing 3′-O-reversibly terminating moieties for building up a nascent single-stranded DNA chain necessary for a de novo synthesis cycle. A 3′-O-reversible terminating moiety would prevent a terminal transferase like TdT from catalysing the nucleotide transferase reaction between the 3′-end of a growing DNA strand and the 5′-triphosphate of an incoming nucleoside triphosphate.

[0009] There is therefore a need to identify modified terminal deoxynucleotidyl transferases that readily incorporate 3′-O-reversibly terminated nucleotides. Said modified terminal deoxynucleotidyl transferases can be used to incorporate 3′-O-reversibly terminated nucleotides in a fashion useful for biotechnology and single-stranded DNA synthesis processes in order to provide an improved method of nucleic acid synthesis that is able to overcome the problems associated with currently available methods.

### BRIEF DESCRIPTION OF THE FIGURES

[0010] FIG. 1. Incorporation of 3′-O—CH₂—N₃ nucleoside 5′-triphosphates by terminal deoxynucleotidyl transferase (TdT) SEQ ID NOs 1-173. Incorporation rate is defined by quantity (pmol) of reversibly terminated nucleoside 5′-triphosphate incorporation to the 3′-end of a single-stranded DNA molecule per nanogram of TdT per minute. Wild-type bovine TdT activity is represented by the dotted line near y-axis=0. The dynamic range of the assay saturates at 2.0 pmol incorporate per nanogram of TdT per minute.

[0011] FIG. 2. Sequence alignment of selected orthologs of wild-type terminal deoxynucleotidyl transferases using the Clustal Omega multiple sequence alignment program provided by the European Molecular Biology Laboratory (EMBL) multiple sequence alignment site.

[0012] FIG. 3. Top panel: Base-modified substrates A*, C*, G*, and T* were supplied to engineered variants in a single nucleotide incorporation assay. A* describes 3′-aminooxy 6-azido 2′-deoxyadenosine 5′-triphosphate; C* describes 3′-aminooxy 4-azido 5-methyl 2′-deoxycytidine 5′-triphosphate; G* describes 3′-aminooxy 2-azido 2′-deoxyguanosine 5′-triphosphate; T* describes 3′-aminooxy 5-(-hydroxy-1-butynyl) 2′-deoxyuridine 5′-triphosphate. A pool of DNA initiators with degenerate ends was immobilised to a solid support and exposed to nucleotide addition mixture (NAM) solutions containing (1) TdT variant, (2) neutral pH buffer, (3) monovalent salt, (4) cobalt chloride, and (5) 3′-ONH₂-dXTP, where X is a modified nucleobase resulting in A*, C*, G*, or T*. The incubation temperature was 37° C. and the reaction time was 2.5 minutes. The solid support was then washed with a high salt solution at neutral pH followed by a low salt solution at neutral pH. The initiator pools were transformed into sequencing libraries and analysed by next-generation sequencing (NGS) on an Illumina NextSeq500 with PE30 reads. Bcl files were converted to fastq files with Illumina's bcl2fastq conversion software and analysed in R. The incorporation efficiency ([reads containing N+1 product]/{[reads containing N initiator]+[reads containing N+1 product]}) was calculated for the addition of each modified base against to all possible initiator contexts. The average incorporation efficiency across all contexts is presented in FIG. 3 (top panel). The single nucleotide incorporations by wild-type bovine and wild-type spotted gar TdT of the base-modified reversibly terminated nucleotides A*, C*, G*, and T* are indicated by the dotted line. The dotted line occurs at y=0 due to the inability of wild-type bovine or spotted gar TdTs to incorporate these base-modified reversibly terminated nucleotides in the assay. All of the presented mutations in the TdT variants resulted in improvements in TdT modified-base incorporation relative to wild-type bovine and wild-type spotted gar TdTs.

[0013] Bottom panel: Solid support synthesis of an 8-nt nucleic acid sequence using 3′-ONH₂ nucleoside 5′-triphosphates with terminal deoxynucleotidyl transferase (TdT) SEQ ID NOs 1 & 344-727. The DNA sequence 5′-ATCGATCG-3′ was synthesized by repeated exposure of a solid support bound DNA initiator to nucleotide addition mixture (NAM) solutions containing (1) TdT, (2) neutral pH buffer, (3) monovalent salt, (4) cobalt chloride, and (5) 3′-ONH₂-dNTP, where N is selected from adenine, thymine, cytosine, or guanine. A cycle consists of the following: (A) NAM solution with a specified A, T, C, or G reversibly terminated nucleotide was incubated for 5 minutes on the solid support at 37 C; (B) the solid support was then washed with a high salt solution at neutral pH; (C) the solid support was then exposed to acidic aqueous sodium nitrite; and (D) the solid support was then washed with the same high salt solution at neutral pH from (B). (A)-(D) were then repeated 7 more times to synthesize the desired 8-nt sequence. Synthesized DNA were analysed by running reactions on a denaturing polyacrylamide gel and quantified by virtue of a fluorophore covalently attached to the DNA initiator. The fraction full length (8-nt species) was determined by taking fluorescence intensity of the 8-nt band and dividing by total lane intensity. Wild-type bovine and spotted gar TdT activities as it relates to fraction full-length are indicated by the dotted line. All mutations included in the TdT variants resulted in improvements in TdT relative to wild-type bovine and spotted gar TdTs.

[0014] FIG. 4. Spotted gar TdT homology structure based on the co-crystal structure of a preferred engineered Nuclera TdT variant bound to a DNA initiator and a reversibly terminated dNTP. An engineered TdT variant with a BRCT-domain truncation was expressed in Escherichia coli and purified through immobilized metal affinity chromatography followed by size exclusion chromatography. The aforementioned TdT (60 micromolar) was then co-crystallized by sitting drop vapor diffusion at 19° C. with a DNA oligonucleotide (5′-TTTTT[ddC]-3′; 120 micromolar), cobalt chloride (1 mM), in the absence (top) or presence (bottom) of dATP-ONH₂ (1 mM) in the following reservoir solutions: Bis-Tris HCl (100 mM), NaCl (27 mM), 22% w/v PEG 3350 or Bis-Tris HCl (10 mM) and 27.5% w/v PEG MME 500, respectively. Plate-like crystals appeared and grew to maximum dimensions of 400×50×5 μm³ over 1 week and diffracted to 2.6 and 2.5 angstroms, respectively, with a space group of P2₁2₁2₁ and unit cell dimensions of a=56.5 Å, b=80.0 Å, c=88.2 Å. and a=55.6 Å, b=79.1 Å, c=88.6 Å, respectively. Data were indexed, integrated, and scaled using the automatic software pipeline at the Diamond Light Source. Molecular replacement with a homology model of Lepisosteus oculatus (spotted gar) followed by cycles of manual model building interspersed with rigid-body, simulated annealing, energy minimization and individual isotropic D-factor produced complete structural models (R_{free}=27.8% and 28.6%, respectively). Cobalt ions were identified by virtue of their anomalous scattering. The spotted gar TdT wild-type sequence (>95% sequence identity) with a BRCT-domain truncation was modelled onto the two structures.

[0015] FIG. 5. Surface representation of spotted gar TdT homology structure modelled onto the crystal structure of an engineered TdT variant as described in FIG. 4 with MENHNQI motif, which includes the ENHNQ motif, highlighted in black. TdT contains two entrances to the nucleotidyl transferase active site in which the DNA initiator and reversibly terminated dNTP can enter and bind. Determined by modelling and visual inspection of the active site, the MENHNQI and ENHNQ motifs controls access to the nucleotidyl transferase active site, and the mutations shown in this patent demonstrate that mutating this motif results in increased TdT incorporation activity of reversibly terminated nucleotides.

[0016] FIG. 6. Surface representations (right is 180 degree rotation of left view) of spotted gar TdT homology structure modelled onto the crystal structure of an engineered TdT variant as described in FIG. 4 with SEGPCLAFMRA, which includes the FMRA motif, highlighted in black. TdT contains two entrances to the nucleotidyl transferase active site in which the DNA initiator and reversibly terminated dNTP can enter and bind. Determined by modelling and visual inspection of the active site, the SEGPLCLAFMRA and FMRA motifs (1) control access of the reversibly terminated nucleotide to the nucleotidyl transferase active site through steric effects and electrostatic interactions and (2) directly packs against the critical TGSR motif, which directly contacts the reversibly terminated nucleotide. Specifically in relation to the TGSR motif, the SEGPLCLAFMRA and FMRA motifs directly contact and modulate the positioning of R438, which directly contacts the reversibly terminated nucleotide. Mutations shown in this patent demonstrate that mutating these motifs result in increased TdT incorporation activity of reversibly terminated nucleotides.

[0017] FIG. 7. Surface representation of spotted gar TdT homology structure modelled onto the crystal structure of an engineered TdT variant as described in FIG. 4 with HFTKMQK motif, which includes the MQK motif, highlighted in black. TdT contains two entrances to the nucleotidyl transferase active site in which the DNA initiator and reversibly terminated dNTP can enter and bind. Determined by modelling and visual inspection of the active site, the HFTKMQK and MQK motifs bind to the nucleic acid initiator and assist in positioning the 3′-end of the initiator for nucleophilic attack against the incoming nucleotide. Mutations shown in this patent demonstrate that mutating this motif results in increased TdT incorporation activity of reversibly terminated nucleotides.

[0018] FIG. 8. Surface representation of spotted gar TdT homology structure modelled onto the crystal structure of an engineered TdT variant as described in FIG. 4 with SAAVCK motif highlighted in black. TdT contains two entrances to the nucleotidyl transferase active site in which the DNA initiator and reversibly terminated dNTP can enter and bind. Determined by modelling and visual inspection of the active site, the SAAVCK motif controls reversibly terminated nucleotide access to the nucleotidyl transferase active site. Mutations shown in this patent demonstrate that mutating this motif results in increased TdT incorporation activity of reversibly terminated nucleotides.

[0019] FIG. 9. Surface (left) and cartoon/sphere (right) representation of spotted gar TdT homology structure modelled onto the crystal structure of an engineered TdT variant as described in FIG. 4 with the GKEC motif, which includes the KEC motif, highlighted in black. TdT contains two entrances to the nucleotidyl transferase active site in which the DNA initiator and reversibly terminated dNTP can enter and bind. Determined by modelling and visual inspection of the active site, the GKEC and KEC motifs control reversibly terminated nucleotide access to and direct binding to the nucleotidyl transferase active site. Mutations shown in this patent demonstrate that mutating this motif results in increased TdT incorporation activity of reversibly terminated nucleotides.

[0020] FIG. 10. Surface representation of spotted gar TdT homology structure modelled onto the crystal structure of an engineered TdT variant as described in FIG. 4 with the DHFQK motif, which includes the DHFQ motif, highlighted in black. TdT contains two entrances to the nucleotidyl transferase active site in which the DNA initiator and reversibly terminated dNTP can enter and bind. Determined by modelling and visual inspection of the active site, the DHFQK and DHFQ motifs control nucleic acid initiator access to the nucleotidyl transferase active site by sterically impinging on the nucleic acid initiator. Mutations shown in this patent demonstrate that mutating this motif results in increased TdT incorporation activity of reversibly terminated nucleotides.

[0021] FIG. 11. Cartoon representation of an engineered TdT variant crystal structure as described in FIG. 4 bound to a DNA initiator and dATP-ONH₂ with the FARHERKMLLDNHA motif highlighted in black spheres. TdT contains two entrances to the nucleotidyl transferase active site in which the DNA initiator and reversibly terminated dNTP can enter and bind. Determined by modelling and visual inspection of the active site, the FARHERKMLLDNHA motif controls nucleotide and nucleic acid initiator binding in the nucleotidyl transferase active site by sterically impinging on the nucleotide and initiator. Additionally, motif FARHERKMLLDNHA is mutated to FARHERKMLLDRHA. The Asn to Arg mutation results in the Arg residue directly binding one out of two of the catalytic cobalt ions, which is required for activity. Mutations shown in this patent demonstrate that mutating residues within this motif adjust the positioning of critical amino acids in contact with either a Co²⁺, the reversibly terminated nucleotide, and/or the nucleic acid initiator to result in increased TdT incorporation activity of reversibly terminated nucleotides.

[0022] FIG. 12. Cartoon representation of an engineered TdT variant crystal structure as described in FIG. 4 bound to a DNA initiator and dATP-ONH₂ with the FARHERKMLLDNHALYDKTKK motif highlighted in black spheres. TdT contains two entrances to the nucleotidyl transferase active site in which the DNA initiator and reversibly terminated dNTP can enter and bind. Determined by modelling and visual inspection of the active site, the FARHERKMLLDNHALYDKTKK motif controls nucleotide and nucleic acid initiator binding in the nucleotidyl transferase active site by sterically impinging on the nucleotide and initiator. Additionally, motif FARHERKMLLDNHALYDKTKK is mutated to FARHERKMLLDRHALYDKTKK. The Asn to Arg mutation results in the Arg residue directly binding one out of two of the catalytic cobalt ions, which is required for activity. Mutations shown in this patent demonstrate that mutating residues within this motif adjust the positioning of critical amino acids in contact with either a Co²⁺, the reversibly terminated nucleotide, and/or the nucleic acid initiator to result in increased TdT incorporation activity of reversibly terminated nucleotides.

[0023] FIG. 13. Cartoon representation of an engineered TdT variant crystal structure as described in FIG. 4 bound to a DNA initiator and dATP-ONH₂ with the DYIDP motif, which contains the YIDP motif, highlighted in black spheres. TdT contains two entrances to the nucleotidyl transferase active site in which the DNA initiator and reversibly terminated dNTP can enter and bind. Determined by modelling and visual inspection of the active site, the DYIDP and YIDP motifs control nucleotide binding in the nucleotidyl transferase active site by modulating the positioning of A494 within the active site. This most C-terminal residue (Ala494) sterically impinges upon the incoming nucleotide. Mutating the YIDP motif, modulates the positioning of the most C-terminal Ala residue resulting in increased TdT incorporation activity of reversibly terminated nucleotides.

[0024] FIG. 14. Cartoon representation of an engineered TdT variant crystal structure as described in FIG. 4 bound to a DNA initiator and dATP-ONH₂ with the YYDIV motif highlighted in black spheres. TdT contains two entrances to the nucleotidyl transferase active site in which the DNA initiator and reversibly terminated dNTP can enter and bind. Determined by modelling and visual inspection of the active site, the YYDIV motif controls positioning of the nucleic acid initiator by sterically impinging upon the antepenultimate (III), penultimate (II), and ultimate (I) 3′-nucleotide in the nucleic acid initiator. In particular, this motif impinges upon pyrimidines (left, as crystallized, I & II shown in sphere representation), but especially purines (right, II modelled into the structure as a purine). Mutating the YYDIV motif, modulates the positioning and access of the nucleic acid initiator into the nucleotidyl transferase active site resulting in increased TdT incorporation activity of reversibly terminated nucleotides.

[0025] FIG. 15. Cartoon representation of an engineered TdT variant crystal structure as described in FIG. 4 bound to a DNA initiator and dATP-ONH₂ with the APPVDNF, which contains the APPVDN motif, motif highlighted in black spheres. In the structure, the APPVDNF motif is shown with an Ala to Met mutation to MPPVDNF. Through modelling, it was determined that the APPVDNF and APPVDN motifs control positioning of the following motifs by directly packing against the YYDIV (upper right) and FARHERKMLLDNHALYDKTKK (lower left) motifs, both of which are shown in light grey spheres. Additionally determined through modelling, the APPVDNF and APPVDN motifs control positioning of the following motifs by determining the loop conformation of the TGSR motif (upper left) and the catalytic triad of aspartates (lower right) critical to the nucleotidyl transferase mechanism, both of which are shown in light grey spheres. Mutations in the APPVDNF and APPVDN motifs directly influence how the aforementioned critical protein motifs to modulate their contacts with the reversibly terminated nucleotide and nucleic acid initiator. Mutations in the APPVDNF and APPVDN motifs have been shown in this patent to result in increased TdT incorporation activity of reversibly terminated nucleotides.

### SUMMARY OF THE INVENTION

[0026] Described herein are modified terminal deoxynucleotidyl transferase (TdT) enzymes or the homologous amino acid sequence of Polμ, Polβ, Polλ, and Polθ of any species or the homologous amino acid sequence of X family polymerases of any species. Terminal transferase enzymes are ubiquitous in nature and are present in many species. Many known TdT sequences have been reported in the NCBI database http://www.ncbi.nlm.nih.gov/.

| GI Number | Species http://www.ncbi.nlm.nih.gov/ |
|---|---|
| gi\|768 | Bos taurus |
| gi\|460163 | Gallus gallus |
| gi\|494987 | Xenopus laevis |
| gi\|354475 | Oncorhynchus mykiss |
| gi\|2149634 | Monodelphis domestica |
| gi\|2802441 | Mus musculus |
| gi\|28852989 | Ambystoma mexicanum |
| gi\|38603668 | Takifugu rubripes |
| gi\|40037389 | Raja eglanteria |
| gi\|0218593 | Ginglymostoma cirratum |
| gi\|46369889 | Danio rerio |
| gi\|73998101 | Canis lupus familiaris |
| gi\|39001476 | Lemur catta |
| gi\|39001490 | Microcebus murinus |
| gi\|39001511 | Otolemur garnettii |
| gi\|48708614 | Mus musculus |
| gi\|49040157 | Rattus norvegicus |
| gi\|49704611 | Equus caballus |
| gi\|64451472 | Bos taurus |
| gi\|69642654 | Xenopus (Silurana) tropicalis |
| gi\|291394899 | Oryctolagus cuniculus |
| gi\|291404551 | Oryctolagus cuniculus |
| gi\|301763246 | Ailuropoda melanoleuca |
| gi\|311271684 | Sus scrota |
| gi\|327280070 | Anolis carolinensis |
| gi\|334313404 | Monodelphis domestica |
| gi\|344274915 | Loxodonta africana |
| gi\|345330196 | Ornithorhynchus anatinus |
| gi\|348588114 | Cavia porcellus |
| gi\|351697151 | Heterocephalus glaber |
| gi\|355562663 | Macaca mulatta |
| gi\|395501816 | Sarcophilus harrisii |
| gi\|395508711 | Sarcophilus harrisii |
| gi\|395850042 | Otolemur garnettii |
| gi\|397467153 | Pan paniscus |
| gi\|403278452 | Saimiri boliviensis boliviensis |
| gi\|410903980 | Takifugu rubripes |
| gi\|410975770 | Felis catus |
| gi\|432092624 | Myotis davidii |
| gi\|432113117 | Myotis davidii |
| gi\|444708211 | Tupaia chinensis |
| gi\|460417122 | Pleurodeles waltl |
| gi\|466001476 | Orcinus orca |
| gi\|471358897 | Trichechus manatus latirostris |
| gi\|478507321 | Ceratotherium simum simum |
| gi\|478528402 | Ceratotherium simum simum |
| gi\|488530524 | Dasypus novemcinctus |
| gi\|499037612 | Maylandia zebra |
| gi\|504135178 | Ochotona princeps |
| gi\|505844004 | Sorex araneus |
| gi\|505845913 | Sorex araneus |
| gi\|507537868 | Jaculus jaculus |
| gi\|507572662 | Jaculus jaculus |
| gi\|507622751 | Octodon degus |
| gi\|507640406 | Echinops telfairi |
| gi\|507669049 | Echinops telfairi |
| gi\|507930719 | Condylura cristata |
| gi\|507940587 | Condylura cristata |
| gi\|511850623 | Mustela putorius furo |
| gi\|512856623 | Xenopus (Silurana) tropicalis |
| gi\|512952456 | Heterocephalus glaber |
| gi\|524918754 | Mesocricetus auratus |
| gi\|527251632 | Melopsittacus undulatus |
| gi\|528493137 | Danio rerio |
| gi\|528493139 | Danio rerio |
| gi\|529438486 | Falco peregrinus |
| gi\|530565557 | Chrysemys picta bellii |
| gi\|532017142 | Microtus ochrogaster |
| gi\|532099471 | Ictidomys tridecemlineatus |
| gi\|533166077 | Chinchilla lanigera |
| gi\|533189443 | Chinchilla lanigera |
| gi\|537205041 | Cricetulus griseus |
| gi\|537263119 | Cricetulus griseus |
| gi\|543247043 | Geospiza fortis |
| gi\|543351492 | Pseudopodoces humilis |
| gi\|543731985 | Columba livia |
| gi\|544420257 | Macaca fascicularis |
| gi\|545193630 | Equus caballus |
| gi\|548384565 | Pundamilia nyererei |
| gi\|551487466 | Xiphophorus maculatus |
| gi\|551523268 | Xiphophorus maculatus |
| gi\|554582962 | Myotis brandtii |
| gi\|554588252 | Myotis brandtii |
| gi\|556778822 | Pantholops hodgsonii |
| gi\|556990133 | Latimeria chalumnae |
| gi\|557297894 | Alligator sinensis |
| gi\|558116760 | Pelodiscus sinensis |
| gi\|558207237 | Myotis lucifugus |
| gi\|560895997 | Camelus ferus |
| gi\|560897502 | Camelus ferus |
| gi\|562857949 | Tupaia chinensis |
| gi\|562876575 | Tupaia chinensis |
| gi\|564229057 | Alligator mississippiensis |
| gi\|564236372 | Alligator mississippiensis |
| gi\|564384286 | Rattus norvegicus |
| gi\|573884994 | Lepisosteus oculatus |

[0027] The sequences of the various described terminal transferases show some regions of highly conserved sequence, and some regions which are highly diverse between different species. A sequence alignment for sequences from a selection of species is shown in FIG. 2.

[0028] The inventors have modified the terminal transferase from Lepisosteus oculatus TdT (spotted gar) (shown as SEQ ID 1). However the corresponding modifications can be introduced into the analagous terminal transferase sequences from any other species, including the sequences listed above in the various NCBI entries, including those shown in FIG. 2 or truncated versions thereof.

[0029] The amino acid sequence of the spotted gar (Lepisosteus oculatus) is shown below (SEQ ID 1)

MLHIPIFPPIKKRQKLPESRNSCKYEVKFSEVAIFLVERKMGSSRRKFLT
NLARSKGFRIEDVLSDAVTHVVAEDNSADELWQWLQNSSLGDLSKIEVLD
ISWFTECMGAGKPVQVEARHCLVKSCPVIDQYLEPSTVETVSQYACQRRT
TMENHNQIFTDAFAILAENAEFNESEGPCLAFMRAASLLKSLPHAISSSK
DLEGLPCLGDQTKAVIEDILEYGQCSKVQDVLCDDRYQTIKLFTSVFGVG
LKTAEKWYRKGFHSLEEVQADNAIHFTKMQKAGFLYYDDISAAVCKAEAQ
AIGQIVEETVRLIAPDAIVTLIGGFRRGKECGHDVDFLITTPEMGKEVWL
LNRLINRLQNQGILLYYDIVESTFDKTRLPCRKFEAMDHFQKCFAIIKLK
KELAAGRVQKDWKAIRVDFVAPPVDNFAFALLGWTGSRQFERDLRRFARH
ERKMLLDNHALYDKTKKIFLPAKTEEDIFAHLGLDYIDPWQRNA

[0030] An engineered variant of this sequence was previously identified as SEQ ID NO 8 in publication WO2016/128731. Further engineered Improvements to this published sequence are described herein. The modified sequences disclosed herein are different to SEQ ID NO 8 disclosed in the prior art. WO2016/128731 SEQ ID NO 2 is a “mis-annotated” wild-type gar sequence.

[0031] SEQ ID NO 8 in publication WO2016/128731 is shown below with the engineered mutations identified:

MLHIPIFPPIKKRQKLPESRNSCKYEVKFSEVAIFLVERKMGSSRRKFLTNLARSKGFRIEDVLSDAV

[chemical structure]

TVETVSQYACQRRTTMENHNQIFTDAFAILAENAEFNESEGPCLAFMRAASLLKSLPHAISSSKDLEG

[chemical structure]

AIHFTKMQKAGFLYYDDISAAVCKAEAQAIGQIVEETVRLIAPDAIVTLTGGFRRGKECGHDVDFLIT
TPEMGKEVWLLNRLINRLQNQGILLYYDIVESTFDKTRLPCRKFEAMDHFQKCFAIIKLKKELAAGRV
QKDWKAIRVDFVAPPVDNFAFALLGWIGSRQFERDLRRFARHERKMLLDNHALYDKTKKIFLPAKTEE
DIFAHLGLDYIDPWQRNA

[0032] The inventors have identified various amino acids modifications in the amino acid sequence having improved properties. Certain regions improve the solubility and handling of the enzyme. Certain other regions improve the ability to incorporate nucleotides with modifications; these modifications include modifications at the 3′-position of the sugar and modifications to the base.

[0033] Described herein are modified terminal deoxynucleotidyl transferase (TdT) enzymes comprising amino acid modifications when compared to a wild type sequence SEQ ID NO 1 or a truncated version thereof or the homologous amino acid sequence of a terminal deoxynucleotidyl transferase (TdT) enzyme in other species or the homologous amino acid sequence of Polμ, Polβ, Polλ, and Polθ of any species or the homologous amino acid sequence of X family polymerases of any species, wherein the amino acid is modified at one or more of the amino acids:

[0034] V32, A33, I34, F35, A53, V68, V71, E97, I101, M108, G109, A110, Q115, V116, S125, T137, Q143, M152, E153, N154, H155, N156, Q157, I158, I165, N169, N173, S175, E176, G177, P178, C179, L180, A181, F182, M183, R184, A185, L188, H194, A195, I196, S197, S198, S199, K200, E203, G204, D210, Q211, T212, K213, A214, I216, E217, D218, L220, Y222, V228, D230, Q238, T239, L242, L251, K260, G261, F262, H263, S264, L265, E267, Q269, A270, D271, N272, A273, H275, F276, T277, K278, M279, Q280, K281, S291, A292, A293, V294, C295, K296, E298, A299, Q300, A301, Q304, I305, T309, V310, R311, L312, I313, A314, I318, V319, T320, G328, K329, E330, C331, L338, T341, P342, E343, M344, G345, K346, W349, L350, L351, N352, R353, L354, I355, N356, R357, L358, Q359, N360, Q361, G362, I363, L364, L365, Y366, Y367, D368, I369, V370, K376, T377, C381, K383, D388, H389, F390, Q391, K392, F394, I397, K398, K400, K401, E402, L403, A404, A405, G406, R407, D411, A421, P422, P423, V424, D425, N426, F427, A430, R438, F447, A448, R449, H450, E451, R452, K453, M454, L455, L456, D457, N458, H459, A460, L461, Y462, D463, K464, T465, K466, K467, T474, D477, D485, Y486, I487, D488, P489.

[0035] Modifications which improve the solubility include a modification within the amino acid region WLLNRLINRLQNQGILLYYDIV shown highlighted in the sequence below.

MLHIPIFPPIKKRQKLPESRNSCKYEVKFSEVAIFLVERKMGSSRRKFLTNLARSKGFRIEDVLSDAV
THVVAEDNSADELWQWLQNSSLGDLSKIEVLDISWFTECMGAGKPVQVEARHCLVKSCPVIDQYLEPS
TVETVSQYACQRRTTMENHNQIFTDAFAILAENAEFNESEGPCLAFMRAASLLKSLPHAISSSKDLEG
LPCLGDQTKAVIEDILEYGQCSKVQDVLCDDRYQTIKLFTSVFGVGLKTAEKWYRKGFHSLEEVQADN
AIHFTKMQKAGFLYYDDISAAVCKAEAQAIGQIVEETVRLIAPDAIVTLTGGFRRGKECGHDVDFLIT

[chemical structure]

QKDWKAIRVDFVAPPVDNFAFALLGWTGSRQFERDLRRFARHERKMLLDNHALYDKTKKIFLPAKTEE
DIFAHLGLDYIDPWQRNA

[0036] Modifications which improve the incorporation of modified nucleotides can be at one or more of selected regions shown below. Regions were selected according to mutation data (FIGS. 1 and 3), sequence alignment (FIG. 2), and structural data obtained from spotted gar TdT co-crystallized with DNA and a 3′-modified dNTP (FIGS. 4-14). The second modification can be selected from one or more of the amino acid regions VAIF, MGA, MENHNQI, SEGPCLAFMRA, HAISSS, DQTKA, KGFHS, QADNA, HFTKMQK, SAAVCK, EAQA, TVRLI, GKEC, TPEMGK, YYDIV, DHFQK, LAAG, APPVDNF, FARHERKMLLDNHALYDKTKK, and DYIDP shown highlighted in the sequence below.

[chemical structure]

[chemical structure]

[chemical structure]

[chemical structure]

[chemical structure]

[chemical structure]

[chemical structure]

[chemical structure]

[0037] Particular modifications which improve the incorporation of modified nucleotides can be at one or more of selected regions shown below. The second modification can be selected from one or more of the amino acid regions VAIF, MGA, ENHNQ, FMRA, HAI, TKA, FHS, QADNA, MQK, SAAVCK, EAQA, TVR, KEC, TPEMGK, DHFQ, LAAG, APPVDN, FARHERKMLLDNHA, and YIDP shown highlighted in the sequence below.

[chemical structure]

[chemical structure]

[chemical structure]

[chemical structure]

[chemical structure]

[chemical structure]

[chemical structure]

[chemical structure]

[0038] Described herein is a modified terminal deoxynucleotidyl transferase (TdT) enzyme comprising at least one amino acid modification when compared to a wild type sequence SEQ ID NO 1 or the homologous amino acid sequence of a terminal deoxynucleotidyl transferase (TdT) enzyme in other species, wherein the modification is selected from one or more of the amino acid regions WLLNRLINRLQNQGILLYYDIV, VAIF, MGA, MENHNQI, SEGPCLAFMRA, HAISSS, DQTKA, KGFHS, QADNA, HFTKMQK, SAAVCK, EAQA, TVRLI, GKEC, TPEMGK, DHFQK, LAAG, APPVDNF, FARHERKMLLDNHALYDKTKK, and DYIDP of the sequence of SEQ ID NO 1 or the homologous regions in other species.

[0039] References to particular sequences include truncations thereof. Included herein are modified terminal deoxynucleotidyl transferase (TdT) enzyme comprising at least one amino acid modification when compared to a wild type sequence SEQ ID NO 1 or a truncated version thereof, or the homologous amino acid sequence of a terminal deoxynucleotidyl transferase (TdT) enzyme in other species, wherein the modification is selected from one or more of the amino acid regions WLLNRLINRLQNQGILLYYDIV, VAIF, MGA, MENHNQI, SEGPCLAFMRA, HAISSS, DQTKA, KGFHS, QADNA, HFTKMQK, SAAVCK, EAQA, TVRLI, GKEC, TPEMGK, DHFQK, LAAG, APPVDNF, FARHERKMLLDNHALYDKTKK, and DYIDP of the sequence of SEQ ID NO 1 or the homologous regions in other species.

[0040] Truncated proteins may include at least the region shown below

TVSQYACQRRTTMENHNQIFTDAFAILAENAEFNESEGPCLAFMRAASLL
KSLPHAISSSKDLEGLPCLGDQTKAVIEDILEYGQCSKVQDVLCDDRYQT
IKLFTSVFGVGLKTAEKWYRKGFHSLEEVQADNAIHFTKMQKAGFLYYDD
ISAAVCKAEAQAIGQIVEETVRLIAPDAIVTLTGGFRRGKECGHDVDFLI
TTPEMGKEVWLLNRLINRLQNQGILLYYDIVESTFDKTRLPCRKFEAMDH
FQKCFAIIKLKKELAAGRVQKDWKAIRVDFVAPPVDNFAFALLGWTGSRQ
FERDLRRFARHERKMLLDNHALYDKTKKIFLPAKTEEDIFAHLGLDYIDP
WQRNA

[0041] Described herein is a modified terminal deoxynucleotidyl transferase (TdT) enzyme comprising at least the sequence:

TVSQYACQRRTTMENHNQIFTDAFAILAENAEFNESEGPCLAFMRAASLL
KSLPHAISSSKDLEGLPCLGDQTKAVIEDILEYGQCSKVQDVLCDDRYQT
IKLFTSVEGVGLKTAEKWYRKGEHSLEEVQADNAIHFTKMQKAGFLYYDD
ISAAVCKAEAQAIGQIVEETVRLIAPDAIVTLTGGFRRGKECGHDVDFLI
TTPEMGKEVWLLNRLINRLQNQGILLYYDIVESTFDKTRLPCRKFEAMDH
FQKCFAIIKLKKELAAGRVQKDWKAIRVDEVAPPVDNFAFALLGWTGSRQ
FERDLRRFARHERKMLLDNHALYDKTKKIFLPAKTEEDIFAHLGLDYIDP
WQRNA

[0042] or the homologous regions in other species, wherein the sequence has one or more amino acid modifications in one or more of the amino acid regions WLLNRLINRLQNQGILLYYDI, MENHNQI, SEGPCLAFMRA, HAISSS, DQTKA, KGFHS, QADNA, HFTKMQK, SAAVCK, EAQA, TVRLI, GKEC, TPEMGK, DHFQK, LAAG, APPVDNF, FARHERKMLLDNHALYDKTKK, and DYIDP of the sequence.

[chemical structure]

[chemical structure]

[chemical structure]

[chemical structure]

[chemical structure]

[chemical structure]

[0043] Disclosed herein is a modified terminal deoxynucleotidyl transferase (TdT) enzyme comprising at least one amino acid modification when compared to a wild type sequence, wherein the modification is selected from one or more of the amino acid regions WLLNRLINRLQNQGILLYYDI, VAIF, MGA, MENHNQI, SEGPCLAFMRA, HAISSS, DQTKA, KGFHS, QADNA, HFTKMQK, SAAVCK, EAQA, TVRLI, GKEC, TPEMGK, DHFQK, LAAG, APPVDNF, FARHERKMLLDNHALYDKTKK, and DYIDP of the sequence of SEQ ID NO 1 or the homologous regions in other species.

[0044] Disclosed herein is a modified terminal deoxynucleotidyl transferase (TdT) enzyme comprising at least one amino acid modification when compared to a wild type sequence, wherein the modification is selected from one or more of the amino acid regions WLLNRLINRLQNQGILLYYDI, VAIF, MGA, ENHNQ, FMRA, HAI, TKA, FHS, QADNA, MQK, SAAVCK, EAQA, TVR, KEC, TPEMGK, DHFQ, LAAG, APPVDN, FARHERKMLLDNHA, and YIDP of the sequence of SEQ ID NO 1 or the homologous regions in other species.

[0045] Described herein is a modified terminal deoxynucleotidyl transferase (TdT) enzyme comprising at least one amino acid modification when compared to a wild type sequence SEQ ID NO 1 or the homologous amino acid sequence of a terminal deoxynucleotidyl transferase (TdT) enzyme in other species, wherein the modification is selected from one or more of the amino acid regions WLLNRLINRLQNQGILLYYDI, VAIF, MGA, ENHNQ, FMRA, HAI, TKA, FHS, QADNA, MQK, SAAVCK, EAQA, TVR, KEC, TPEMGK, DHFQ, LAAG, APPVDN, FARHERKMLLDNHA, and YIDP of the sequence of SEQ ID NO 1 or the homologous regions in other species.

[0046] Homologous refers to protein sequences between two or more proteins that possess a common evolutionary origin, including proteins from superfamilies in the same species of organism as well as homologous proteins from different species. Such proteins (and their encoding nucleic acids) have sequence homology, as reflected by their sequence similarity, whether in terms of percent identity or by the presence of specific residues or motifs and conserved positions. A variety of protein (and their encoding nucleic acid) sequence alignment tools may be used to determine sequence homology. For example, the Clustal Omega multiple sequence alignment program provided by the European Molecular Biology Laboratory (EMBL) can be used to determine sequence homology or homologous regions.

[0047] Improved sequences as described herein can contain both modifications, namely

[0048] a. a first modification is within the amino acid region WLLNRLINRLQNQGILLYYDIV of the sequence of SEQ ID NO 1 or the homologous region in other species; and

[0049] b. a second modification is selected from one or more of the amino acid regions VAIF, MGA, MENHNQI, SEGPCLAFMRA, HAISSS, DQTKA, KGFHS, QADNA, HFTKMQK, SAAVCK, EAQA, TVRLI, GKEC, TPEMGK, DHFQK, LAAG, APPVDNF, FARHERKMLLDNHALYDKTKK, and DYIDP of the sequence of SEQ ID NO 1 or the homologous regions in other species.

[0050] The sequence can be truncated

[0051] Improved sequences as described herein can contain both modifications, namely

[0052] a. a first modification is within the amino acid region WLLNRLINRLQNQGILLYYDI of the sequence of SEQ ID NO 1 or the homologous region in other species; and

[0053] b. a second modification is selected from one or more of the amino acid regions VAIF, MGA, ENHNQ, FMRA, HAI, TKA, FHS, QADNA, MQK, SAAVCK, EAQA, TVR, KEC, TPEMGK, DHFQ, LAAG, APPVDN, FARHERKMLLDNHA, and YIDP of the sequence of SEQ ID NO 1 or the homologous regions in other species.

[0054] As a comparison with other species, the sequence of Bos taurus (cow) TdT is shown below:

MDPLCTASSGPRKKRPRQVGASMASPPHDIKFQNLVLFILEKKMGTTRRN
FLMELARRKGFRVENELSDSVTHIVAENNSGSEVLEWLQVQNIRASSQLE
LLDVSWLIESMGAGKPVEITGKHQLVVRTDYSATPNPGFQKTPPLAVKKI
SQYACQRKTTLNNYNHIFTDAFEILAENSEFKENEVSYVTFMRAASVLKS
LPFTIISMKDTEGIPCLGDKVKCIIEEIIEDGESSEVKAVLNDERYQSFK
LFTSVFGVGLKTSEKWFRMGFRSLSKIMSDKTLKFTKMQKAGFLYYEDLV
SCVTRAEAEAVGVLVKEAVWAFLPDAFVTMTGGFRRGKKIGHDVDFLITS
PGSAEDEEQLLPKVINLWEKKGLLLYYDLVESTFEKFKLPSRQVDTLDHF
QKCFLILKLHHQRVDSSKSNQQEGKTWKAIRVDLVMCPYENRAFALLGWT
GSRQFERDIRRYATHERKMMLDNHALYDKTKRVFLKAESEEEIFAHLGLD
YIEPWERNA

[0055] The homologous regions in the sequences are highlighted below.

[0056] Modifications which improve the solubility include a modification within the amino acid region QLLPKVINLWEKKGLLLYYDLV shown highlighted in the sequence below.

MDPLCTASSGPRKKRPRQVGASMASPPHDIKFQNLVLFILEKKMGTTRRNFLMELARRKGFRVENELS
DSVTHIVAENNSGSEVLEWLQVQNIRASSQLELLDVSWLIESMGAGKPVEITGKHQLVVRTDYSATPN
PGFQKTPPLAVKKISQYACQRKTTLNNYNHIFTDAFEILAENSEFKENEVSYVTFMRAASVLKSLPFT
IISMKDTEGIPCLGDKVKCIIEEIIEDGESSEVKAVLNDERYQSFKLFTSVFGVGLKTSEKWFRMGFR
SLSKIMSDKTLKFTKMQKAGFLYYEDLVSCVTRAEAEAVGVLVKEAVWAFLPDAFVTMTGGFRRGKKI

[chemical structure]

LHHQRVDSSKSNQQEGKTWKAIRVDLVMCPYENRAFALLGWTGSRQFERDIRRYATHERKMMLDNHAL
YDKTKRVFLKAESEEEIFAHLGLDYIEPWERNA

[0057] Modifications which improve the incorporation of modified nucleotides can be at one or more of selected regions shown below. The second modification can be selected from one or more of the amino acid regions LVLF, MGA, LNNYNHI, NEVSYVTFMRA, FTIISM, DKVKC, MGFRS, MSDKT, KFTKMQK, VSCVTR, EAEA, AVWAFL, GKKI, SPGSAE, YYDLV, DHFQK, MCPYENR, YATHERKMMLDNHALYDKTKR, and DYIEP shown highlighted in the sequence below.

[chemical structure]

[chemical structure]

[chemical structure]

[chemical structure]

[chemical structure]

[chemical structure]

[chemical structure]

[chemical structure]

[0058] Modifications which improve the incorporation of modified nucleotides can be at one or more of selected regions shown below. The second modification can be selected from one or more of the amino acid regions LVLF, MGA, NNYNH, FMRA, FTI, VKC, FRS, MSDKT, MQK, EAEA, AVW, KKI, SPGSAE, DHFQ, MCPYEN, YATHERKMMLDNHA, and YIEP shown highlighted in the sequence below.

[chemical structure]

[chemical structure]

[chemical structure]

[chemical structure]

[chemical structure]

[chemical structure]

[chemical structure]

[chemical structure]

[0059] As a comparison with other species, the sequence of Mus musculus (mouse) TdT is shown below:

MDPLQAVHLGPRKKRPRQLGTPVASTPYDIRFRDLVLFILEKKMGTTRRA
FLMELARRKGFRVENELSDSVTHIVAENNSGSDVLEWLQLQNIKASSELE
LLDISWLIECMGAGKPVEMMGRHQLVVNRNSSPSPVPGSQNVPAPAVKKI
SQYACQRRTTLNNYNQLFTDALDILAENDELRENEGSCLAFMRASSVLKS
LPFPITSMKDTEGIPCLGDKVKSIIEGIIEDGESSEAKAVLNDERYKSFK
LFTSVFGVGLKTAEKWFRMGFRTLSKIQSDKSLRFTQMQKAGFLYYEDLV
SCVNRPEAEAVSMLVKEAVVTFLPDALVTMTGGFRRGKMTGHDVDFLITS
PEATEDEEQQLLHKVTDFWKQQGLLLYCDILESTFEKFKQPSRKVDALDH
FQKCFLILKLDHGRVHSEKSGQQEGKGWKAIRVDLVMCPYDRRAFALLGW
TGSRQFERDLRRYATHERKMMLDNHALYDRTKGKTVTISPLDGKVSKLQK
ALRVFLEAESEEEIFAHLGLDYIEPWERNA

[0060] Modifications which improve the solubility include a modification within the amino acid region QLLHKVTDFWKQQGLLLYCDIL shown highlighted in the sequence below.

MDPLQAVHLGPRKKRPRQLGTPVASTPYDIRFRDLVLFILEKKMGTTRRAFLMELARRKGFRVENELS
DSVTHIVAENNSGSDVLEWLQLQNIKASSELELLDISWLIECMGAGKPVEMMGKHQLVVNRNSSPSPV
PGSQNVPAPAVKKISQYACQRRTTLNNYNQLFTDALDILAENDELRENEGSCLAFMRASSVLKSLPFP
ITSMKDTEGIPCLGDKVKSIIEGIIEDGESSEAKAVLNDERYKSFKLFTSVFGVGLKTAEKWFRMGFR
TLSKIQSDKSLRFTQMQKAGFLYYEDLVSCVNRPEAEAVSMLVKEAVVTFLPDALVTMTGGFRRGKMT

[chemical structure]

KLDHGRVHSEKSGQQEGKGWKAIRVDLVMCPYDRRAFALLGWTGSRQFERDLRRYATHERKMMLDNHA
LYDRTKGKTVTISPLDGKVSKLQKALRVFLEAESEEEIFAHLGLDYIEPWERNA

[0061] Modifications which improve the incorporation of modified nucleotides can be at one or more of selected regions shown below. The second modification can be selected from one or more of the amino acid regions LVLF, MGA, LNNYNQL, NEGSCLAFMRA, FPITSM, DKVKS, MGFRT, QSDKS, RFTQMQK, VSCVNR, EAEA, AVVTFL, GKMT, SPEATE, DHFQK, SGQ, MCPYDRR, YATHERKMMLDNHALYDRT, R, and DYIEP shown highlighted in the sequence below.

[chemical structure]

[chemical structure]

[chemical structure]

[chemical structure]

[chemical structure]

[chemical structure]

[chemical structure]

[chemical structure]

[0062] Modifications which improve the incorporation of modified nucleotides can be at one or more of selected regions shown below. The second modification can be selected from one or more of the amino acid regions LVLF, MGA, LNNYNQ, NEGSCLAFMRA, FPI, VKS, FRT, SKIQSDKS, MQK, VSCVNR, EAEA, AVV, KMT, SPEATE, DHFQK, MCPYDR, YATHERKMMLDNHA, and YIEP shown highlighted in the sequence below.

[chemical structure]

[chemical structure]

[chemical structure]

[chemical structure]

[chemical structure]

[chemical structure]

[chemical structure]

[chemical structure]

[0063] Modifications which improve the incorporation of modified nucleotides can be at one or more of selected regions shown below. The second modification can be selected from one or more of the amino acid regions LVLF, MGA, NNYNQ, FMRA, FPI, VKS, FRT, QSDKS, MQK, VSCVNR, EAEA, AVV, KMT, SPEATE, DHFQ, MCPYDR, YATHERKMMLDNHA, and YIEP shown highlighted in the sequence below.

[chemical structure]

[chemical structure]

[chemical structure]

[chemical structure]

[chemical structure]

[chemical structure]

[chemical structure]

[chemical structure]

[0064] Thus by a process of aligning sequences, it is immediately apparent which regions in the sequences of terminal transferases from other species correspond to the sequences described herein with respect to the spotted gar sequence shown in SEQ ID NO 1.

[0065] Sequence homology extends to all modified or wild-type members of family X polymerases, such as DNA Polμ (also known as DNA polymerase mu or POLM), DNA Polβ (also known as DNA polymerase beta or POLB), and DNA Polλ (also known known as DNA polymerase lambda or POLL). It is well known in the art that all family X member polymerases, of which TdT is a member, either have terminal transferase activity or can be engineered to gain terminal transferase activity akin to terminal deoxynucleotidyl transferase (Biochim Biophys Acta. 2010 May; 1804(5): 1136-1150). For example, when the following human TdT loop1 amino acid sequence

. . . ESTFEKLRLPSRKVDALDHF . . .

[0066] was engineered to replace the following human Polμ amino acid residues

. . . HSCCESPTRLAQQSHMDAF . . .,

[0067] the chimeric human Polμ containing human TdT loop1 gained robust terminal transferase activity (Nucleic Acids Res. 2006 September; 34(16): 4572-4582).

[0068] Furthermore, it was generally demonstrated in US patent application no. 2019/0078065 that family X polymerases when engineered to contain TdT loop1 chimeras could gain robust terminal transferase activity. Additionally, it was demonstrated that TdT could be converted into a template-dependent polymerase through specific mutations in the loop1 motif (Nucleic Acids Research, June 2009, 37(14):4642-4656). As it has been shown in the art, family X polymerases can be trivially modified to either display template-dependent or template-independent nucleotidyl transferase activities. Therefore, all motifs, regions, and mutations demonstrated in this patent can be trivially extended to modified X family polymerases to enable modified X family polymerases to incorporate 3′-modified nucleotides, reversibly terminated nucleotides, and modified nucleotides in general to effect methods of nucleic acid synthesis.

[0069] As a comparison with other family X polymerases, the human Polμ sequence is shown below:

MLPKRRRARVGSPSGDAASSTPPSTRFPGVAIYLVEPRMGRSRRAFLTGL
ARSKGFRVLDACSSEATHVVMEETSAEEAVSWQERRMAAAPPGCTPPALL
DISWLTESLGAGQPVPVECRHRLEVAGPRKGPLSPAWMPAYACQRPTPLT
HHNTGLSEALEILAEAAGFEGSEGRLLTFCRAASVLKALPSPVTTLSQLQ
GLPHFGEHSSRVVQELLEHGVCEEVERVRRSERYQTMKLFTQIFGVGVKT
ADRWYREGLRTLDDLREQPQKLTQQQKAGLQHHQDLSTPVLRSDVDALQQ
VVEEAVGQALPGATVTLTGGFRRGKLQGHDVDFLITHPKEGQEAGLLPRV
MCRLQDQGLILYHQHQHSCCESPTRLAQQSHMDAFERSFCIFRLPQPPGA
AVGGSTRPCPSWKAVRVDLVVAPVSQFPFALLGWTGSKLFQRELRRFSRK
EKGLWLNSHGLFDPEQKTFFQAASEEDIFRHLGLEYLPPEQRNA

[0070] Modifications which improve the solubility include a modification within the amino acid region GLLPRVMCRLQDQGLILYHQHQ shown highlighted in the sequence below.

MLPKRRRARVGSPSGDAASSTPPSTRFPGVAIYLVEPRMGRSRRAFLTGLARSKGFRVLDACSSEATH
VVMEETSAEEAVSWQERRMAAAPPGCTPPALLDISWLTESLGAGQPVPVECRHRLEVAGPRKGPLSPA
WMPAYACQRPTPLTHHNTGLSEALEILAEAAGFEGSEGRLLTFCRAASVLKALPSPVTTLSQLQGLPH
FGEHSSRVVQELLEHGVCEEVERVRRSERYQTMKLFTQIFGVGVKTADRWYREGLRTLDDLREQPQKL
TQQQKAGLQHHQDLSTPVLRSDVDALQQVVEEAVGQALPGATVTLTGGFRRGKLQGHDVDFLITHPKE

[chemical structure]

CPSWKAVRVDLVVAPVSQFPFALLGWTGSKLFQRELRRFSRKEKGLWLNSHGLFDPEQKTFFQAASEE
DIFRHLGLEYLPPEQRNA

[0071] Modifications which improve the incorporation of modified nucleotides can be at one or more of selected regions shown below. The second modification can be selected from one or more of the amino acid regions VAIY, LGA, LTHHNTG, SEGRLLTFCRAA, SPVTTL, EHSSR, EGLRT, REQP, KLTQQQKA, STPVLR, DVDA, AVGQA, GKLQ, HPKEGQ, YHQHQ, DAFER, VAPVSQ, FSRKEKGLWLNSHGLFDPEQK, AND EYLPP shown highlighted in the sequence below.

[chemical structure]

[chemical structure]

[chemical structure]

[chemical structure]

[chemical structure]

[chemical structure]

[chemical structure]

[chemical structure]

[0072] Thus by a process of aligning sequences, it is immediately apparent which regions in the sequences of all family X polymerases from any species correspond to the sequences described herein with respect to the spotted gar sequence shown in SEQ ID NO 1.

[0073] Furthermore, the A family polymerase, DNA Polθ (also known as DNA polymerase theta or POLQ) was demonstrated to display robust terminal transferase capability (eLife. 2016; 5: e13740). DNA Polθ was also demonstrated to be useful in methods of nucleic acid synthesis (GB patent application no. 2553274). In US patent application no. 2019/0078065, it was demonstrated that chimeras of DNA Polθ and family X polymerases could be engineered to gain robust terminal transferase activity and become competent for methods of nucleic acid synthesis. Therefore, all motifs, regions, and mutations demonstrated in this patent can be trivially extended to modified A family polymerases, especially DNA Polθ, to enable modified A family polymerases to incorporate 3′-modified nucleotides, reversibly terminated nucleotides, and modified nucleotides in general to effect methods of nucleic acid synthesis.

### DETAILED DESCRIPTION OF THE INVENTION

[0074] Described herein are modified terminal deoxynucleotidyl transferase (TdT) enzymes. Terminal transferase enzymes are ubiquitous in nature and are present in many species. Many known TdT sequences have been reported in the NCBI database. The sequences described herein are modified from the sequence of the Spotted Gar, but the corresponding changes can be introduced into the homologous sequences from other species. Homologous amino acid sequences of Polμ, Polβ, Polλ, and Polθ or the homologous amino acid sequence of X family polymerases also possess terminal transferase activity. References to terminal transferase also include homologous amino acid sequences of Polμ, Polβ, Polλ, and Polθ or the homologous amino acid sequence of X family polymerases where such sequences possess terminal transferase activity.

[0075] Disclosed herein is a modified terminal deoxynucleotidyl transferase (TdT) enzyme comprising at least one amino acid modification when compared to a wild type sequence, wherein the modification is selected from one or more of the amino acid regions WLLNRLINRLQNQGILLYYDIV, VAIF, MGA, MENHNQI, SEGPCLAFMRA, HAISSS, DQTKA, KGFHS, QADNA, HFTKMQK, SAAVCK, EAQA, TVRLI, GKEC, TPEMGK, DHFQK, LAAG, APPVDNF, FARHERKMLLDNHALYDKTKK, and DYIDP of the sequence of SEQ ID NO 1 or the homologous regions in other species.

[0076] Described herein is a modified terminal deoxynucleotidyl transferase (TdT) enzyme comprising at least the sequence ID 729:

TVSQYACQRRTTMENHNQIFTDAFAILAENAEFNESEGPCLAFMRAASLL
KSLPHAISSSKDLEGLPCLGDQTKAVIEDILEYGQCSKVQDVLCDDRYQT
IKLFTSVFGVGLKTAEKWYRKGFHSLEEVQADNAIHFTKMQKAGFLYYDD
ISAAVCKAEAQAIGQIVEETVRLIAPDAIVTLTGGFRRGKECGHDVDFLI
TTPEMGKEVWLLNRLINRLQNQGILLYYDIVESTFDKTRLPCRKFEAMDH
FQKCFAIIKLKKELAAGRVQKDWKAIRVDEVAPPVDNFAFALLGWTGSRQ
FERDLRRFARHERKMLLDNHALYDKTKKIFLPAKTEEDIFAHLGLDYIDP
WQRNA

[0077] or the equivalent homologous region in other species, wherein the sequence has one or more amino acid modifications in one or more of the amino acid regions WLLNRLINRLQNQGILLYYDIV, MENHNQI, SEGPCLAFMRA, HAISSS, DQTKA, KGFHS, QADNA, HFTKMQK, SAAVCK, EAQA, TVRLI, GKEC, TPEMGK, DHFQK, LAAG, APPVDNF, FARHERKMLLDNHALYDKTKK, and DYIDP of the sequence. The sequence above of 355 amino acids can be attached to other amino acids without affecting the function of the enzyme. For example there can be a further N-terminal sequence that is incorporated simply as a protease cleavage site, for example the sequence MENLYFQG.

[0078] Disclosed is a modified terminal deoxynucleotidyl transferase (TdT) enzyme comprising at least one amino acid modification when compared to a wild type sequence SEQ ID NO 1 or the homologous amino acid sequence of a terminal deoxynucleotidyl transferase (TdT) enzyme in other species, wherein the modification is selected from one or more of the amino acid regions WLLNRLINRLQNQGILLYYDI, VAIF, MGA, ENHNQ, FMRA, HAI, TKA, FHS, QADNA, MQK, SAAVCK, EAQA, TVR, KEC, TPEMGK, DHFQ, LAAG, APPVDN, FARHERKMLLDNHA, and YIDP of the sequence of SEQ ID NO 1 or the homologous regions in other species.

[0079] Further disclosed is a modified terminal deoxynucleotidyl transferase (TdT) enzyme comprising at least two amino acid modifications when compared to a wild type sequence SEQ ID NO 1 or the homologous amino acid sequence of a terminal deoxynucleotidyl transferase (TdT) enzyme in other species, wherein;

[0080] a. a first modification is within the amino acid region WLLNRLINRLQNQGILLYYDIV of the sequence of SEQ ID NO 1 or the homologous region in other species; and

[0081] b. a second modification is selected from one or more of the amino acid regions VAIF, MGA, ENHNQ, FMRA, HAI, TKA, FHS, QADNA, MQK, SAAVCK, EAQA, TVR, KEC, TPEMGK, DHFQ, LAAG, APPVDN, FARHERKMLLDNHA, and YIDP of the sequence of SEQ ID NO 1 or the homologous regions in other species.

[0082] When compared to the sequence of Bos taurus (cow) TdT; SEQ ID NO 2,

[0083] a. a first modification is within the amino acid region QLLPKVINLWEKKGLLLYYDLV of the sequence of SEQ ID NO 2 or the homologous region in other species; and

[0084] b. a second modification is selected from one or more of the amino acid regions LVLF, MGA, NNYNH, FMRA, FTI, VKC, FRS, MSDKT, MQK, EAEA, AVW, KKI, SPGSAE, MCP, YATHERKMMLDNHA, and YIEP of the sequence of SEQ ID NO 2 or the homologous regions in other species.

[0085] When compared to the sequence of Mus musculus (mouse) TdT; SEQ ID NO 3,

[0086] a. a first modification is within the amino acid region QLLHKVTDFWKQQGLLLYCDIL of the sequence of SEQ ID NO 3 or the homologous region in other species; and

[0087] b. a second modification is selected from one or more of the amino acid regions LVLF, MGA, NNYNQ, FMRA, FPI, VKS, FRT, QSDKS, MQK, VSCVNR, EAEA, AVV, KMT, SPEATE, DHFQ, MCPYDR, YATHERKMMLDNHA, and YIEP of the sequence of SEQ ID NO 3 or the homologous regions in other species.

[0088] The modifications can be chosen from any amino acid that differs from the wild type sequence. The amino acid can be a naturally occurring amino acid. The modified amino acid can be selected from ala, arg, asn, asp, cys, gln, glu, gly, his, ile, leu lys, met, phe, pro, ser, thr, trp, val, and sec.

[0089] For the purposes of brevity, the modifications are further described in relation to SEQ ID NO 1, but the modifications are applicable to the sequences from other species, for example those sequences listed above having sequences in the NCBI database. The sequence modifications also apply to truncated versions of SEQ ID NO 1.

[0090] The sequences can be modified at positions in addition to those regions described. Embodiments on the invention may include for example sequences having modifications to amino acids outside the defined positions, providing those sequences retain terminal transferase activity. Embodiments of the invention may include for example sequences having truncations of amino acids outside the defined positions, providing those sequences retain terminal transferase activity. For example the sequences may be BRCT truncated as described in application WO2018215803 where amino acids are removed from the N-terminus whilst retaining or improving activity. Alterations, additions, insertions or deletions or truncations to amino acid positions outside the claimed regions are therefore within the scope of the invention, providing that the claimed regions as defined are modified as claimed. The sequences described herein refer to TdT enzymes, which are typically at least 300 amino acids in length. All sequences described herein can be seen as having at least 300 amino acids. The claims do not cover peptide fragments or sequences which do not function as terminal transferase enzymes.

[0091] The modification within the region WLLNRLINRLQNQGILLYYDIV or the corresponding region from other species help improve the solubility of the enzyme. The modification within the amino acid region WLLNRLINRLQNQGILLYYDIV can be at one or more of the underlined amino acids.

[0092] Particular changes can be selected from W-Q, N-P, R-K, L-V, R-L, L-W, Q-E, N-K, Q-K or I-L.

[0093] The sequence WLLNRLINRLQNQGILLYYDIV can be altered to QLLPKVINLWEKKGLLLYYDLV.

[0094] The second modification improves incorporation of nucleotides having a modification at the 3′ position in comparison to the wild type sequence. The second modification can be selected from one or more of the amino acid regions VAIF, MGA, ENHNQ, FMRA, HAI, TKA, FHS, QADNA, MQK, SAAVCK, EAQA, TVR, KEC, TPEMGK, DHFQ LAAG, APPVDN, FARHERKMLLDNHA, and YIDP of the sequence of SEQ ID NO 1 or the homologous regions in other species. The second modification can be selected from two or more of the amino acid regions VAIF, EDN, MGA, ENHNQ, FMRA, HAI, TKA, FHS, QADNA, MQK, SAAVCK, EAQA, TVR, KEC, TPEMGK, DHFQ, LAAG, APPVDN, FARHERKMLLDNHA, and YIDP of the sequence of SEQ ID NO 1 or the homologous regions in other species shown highlighted in the sequence below.

[chemical structure]

[chemical structure]

[chemical structure]

[chemical structure]

[chemical structure]

[chemical structure]

[chemical structure]

[chemical structure]

[0095] The identified positions commence at positions V32, M108, F182, T212, D271, M279, E298, A421, L456, Y486. Modifications disclosed herein contain at least one modification at the defined positions.

[0096] In the sequence below the modified regions are numbered thus

[chemical structure]

[chemical structure]

[chemical structure]

[chemical structure]

[chemical structure]

[chemical structure]

[chemical structure]

[chemical structure]

[0097] WLLNRLINRLQNQGILLYYDIV, 349 to 370

[0098] VAIF, 32 to 35

[0099] MGA, 108 to 110

[0100] MENHNQI, 152 to 158

[0101] SEGPCLAFMRA, 175 to 185

[0102] HAISSS, 194 to 199

[0103] DQTKA, 210 to 214

[0104] KGFHS, 260 to 264

[0105] QADNA, 269 to 273

[0106] HFTKMQK, 275 to 281

[0107] SAAVCK, 291 to 296

[0108] EAQA, 298 to 301

[0109] TVRLI, 309 to 313

[0110] GKEC, 328 to 331

[0111] TPEMGK, 341 to 346

[0112] DHFQK, 388 to 392

[0113] LAAG, 403 to 406

[0114] APPVDNF, 421 to 427

[0115] FARHERKMLLDNHALYDKTKK, 447 to 467

[0116] DYIDP, 485 to 489

[0117] The modified amino acid can be in the region FMRA. The modified amino acid can be in the region QADNA. The modified amino acid can be in the region EAQA. The modified amino acid can be in the region APP. The modified amino acid can be in the region LDNHA. The modified amino acid can be in the region YIDP. The region FARHERKMLLDNHA is advantageous for removing substrate biases in modifications. The FARHERKMLLDNHA region appears highly conserved across species.

[0118] The modification selected from one or more of the amino acid regions FMRA, QADNA, EAQA, APP, FARHERKMLLDNHA, and YIDP can be at the underlined amino acid(s).

[0119] Rather than the invention being described by modifications in defined domains, the sequences can be defined by modifications at certain defined amino acids. Described herein are modified terminal deoxynucleotidyl transferase (TdT) enzymes comprising amino acid modifications when compared to a wild type sequence SEQ ID NO 1 or a truncated version thereof or the homologous amino acid sequence of a terminal deoxynucleotidyl transferase (TdT) enzyme in other species, wherein the amino acid is modified at one or more of the amino acids A53, V68, V71, E97, I101, G109, Q115, V116, S125, T137, Q143, M152, N154, H155, Q157, I158, I165, N169, S175, G177, C179, L180, A181, M183, A195, S197, S198, S199, K200, D210, Q211, T212, K213, A214, E217, T239, K260, F262, S264, Q269, D271, N272, A273, H275, T277, K281, S291, K296, Q300, T309, R311, L312, I313, G328, E330, C331, T341, P342, E343, M344, G345, K346, N352, R353, L354, I355, N356, L358, N360, Q361, G362, I363, Y366, Y367, D368, V370, H389, K392, L403, A405, G406, D411, A421, P422, V424, N426, F427, R438, F447, R452, K453, L455, Y462, K464, T465, K467, D485, I487 and/or D488.

[0120] Described herein are modified terminal deoxynucleotidyl transferase (TdT) enzymes comprising amino acid modifications when compared to a wild type sequence SEQ ID NO 1 or the homologous amino acid sequence of a terminal deoxynucleotidyl transferase (TdT) enzyme in other species, wherein the amino acid is modified at one or more of the amino acids

[0121] V32, A33, I34, F35, A53, V68, V71, E97, I101, M108, G109, A110, Q115, V116, S125, T137, Q143, M152, E153, N154, H155, N156, Q157, I158, I165, N169, N173, S175, E176, G177, P178, C179, L180, A181, F182, M183, R184, A185, L188, H194, A195, I196, S197, S198, S199, K200, E203, G204, D210, Q211, T212, K213, A214, I216, E217, D218, L220, Y222, V228, D230, Q238, T239, L242, L251, K260, G261, F262, H263, S264, L265, E267, Q269, A270, D271, N272, A273, H275, F276, T277, K278, M279, Q280, K281, S291, A292, A293, V294, C295, K296, E298, A299, Q300, A301, Q304, I305, T309, V310, R311, L312, I313, A314, I318, V319, T320, G328, K329, E330, C331, L338, T341, P342, E343, M344, G345, K346, W349, L350, L351, N352, R353, L354, I355, N356, R357, L358, Q359, N360, Q361, G362, I363, L364, L365, Y366, Y367, D368, I369, V370, K376, T377, C381, K383, D388, H389, F390, Q391, K392, F394, I397, K398, K400, K401, E402, L403, A404, A405, G406, R407, D411, A421, P422, P423, V424, D425, N426, F427, A430, R438, F447, A448, R449, H450, E451, R452, K453, M454, L455, L456, D457, N458, H459, A460, L461, Y462, D463, K464, T465, K466, K467, T474, D477, D485, Y486, I487, D488, P489.

[0122] Specific amino acid changes can include any one of A53G, V68I, V71I, E97A, I101V, G109E, G109R, Q115E, V116I, V116S, S125R, T137A, Q143P, M152L, M152T, N154H, H155C, H155N, H155R, Q157K, Q157R, I158V, I158L, I158M, I165V, N169R, N173R, S175N, G177S, G177V, G177D, C179A, C179S, L180V, A181E, M183R, L188V, A195T, A195P, S197I, S197L, S198R, S198C, S199L, K200R, E203Q, G204D, D210E, Q211R, T212S, K213S, A214R, A214C, A214G, I216M, E217Q, D218E, L220I, L220F, L220Y, Y222C, V228A, D230E, Q238K, T239S, L242Q, L251P, K260M, F262L, L265F, S264T, E267D, Q269K, D271N, D271E, N272K, A273S, A273T, H275Q, T277S, K281R, S291N, S291T, K296R, Q300D, Q304R, Q304C, Q304H, I305V, T309A, R311W, R311H, L312G, L312K, L312A, I313M, A314T, I318L, V319L, T320A, G328A, E330N, E330S, C331I, L338I, T341S, P342A, E343G, E343Q, M344A, M344Q, M344K, G345R, K346R, N352Q, K353R, K353D, V354I, V354L, I355V, I355M, N356R, N356D, W358L, N360K, Q361K, G362E, I363L, Y366F, Y367C, D368H, D368E, V370I, K376I, T377S, T377L, T377A, C381S, K383R, H389N, H389A, K392Q, F394W, I397L, K398R, K400E, K400N, K401A, K401Q, E402Q, L403Q, L403R, A405D, G406R, R407C, D411N, A421L, A421M, A421V, P422A, P422C, V424Y, V424I, V424A, N426R, N426C, F427Y, A430T, R438K, F447W, R452K, L455I, K453R, Y462F, K464R, T465R, K467R, T474S, D477E, D485E, I487V, and/or D488P.

[0123] Amino acid changes include any two or more of A53G, V68I, V71I, E97A, I101V, G109E, G109R, Q115E, V116I, V116S, S125R, T137A, Q143P, M152L, M152T, N154H, H155C, H155N, H155R, Q157K, Q157R, I158V, I158L, I158M, I165V, N169R, N173R, S175N, G177S, G177V, G177D, C179A, C179S, L180V, A181E, M183R, L188V, A195T, A195P, S197I, S197L, S198R, S198C, S199L, K200R, E203Q, G204D, D210E, Q211R, T212S, K213S, A214R, A214C, A214G, I216M, E217Q, D218E, L220I, L220F, L220Y, Y222C, V228A, D230E, Q238K, T239S, L242Q, L251P, K260M, F262L, L265F, S264T, E267D, Q269K, D271N, D271E, N272K, A273S, A273T, H275Q, T277S, K281R, S291N, S291T, K296R, Q300D, Q304R, Q304C, Q304H, I305V, T309A, R311W, R311H, L312G, L312K, L312A, I313M, A314T, I318L, V319L, T320A, G328A, E330N, E330S, C331I, L338I, T341S, P342A, E343G, E343Q, M344A, M344Q M344K, G345R, K346R, N352Q, K353R, K353D, V354I, V354L, I355V, I355M, N356R, N356D, W358L, N360K, Q361K, G362E, I363L, Y366F, Y367C, D368H, D368E, V370I, K376I, T377S, T377L, T377A, C381S, K383R, H389N, H389A, K392Q, F394W, I397L, K398R, K400E, K400N, K401A, K401Q, E402Q, L403Q, L403R, A405D, G406R, R407C, D411N, A421L, A421M, A421V, P422A, P422C, V424Y, V424I, V424A, N426R, N426C, F427Y, A430T, R438K, F447W, R452K, L455I, K453R, Y462F, K464R, T465R, K467R, T474S, D477E, D485E, I487V, and/or D488P.

[0124] The modification of QADNA to KADKA, QADKA, KADNA, QADNS, KADNT, or QADNT is advantageous for the incorporation of 3′-O-modified nucleoside triphosphates to the 3′-end of nucleic acids and removing substrate biases during the incorporation of modified nucleoside triphosphates. The modification of APPVDN to MCPVDN, MPPVDN, ACPVDR, VPPVDN, LPPVDR, ACPYDN, LCPVDN, or MAPVDN is advantageous for the incorporation of 3′-O-modified nucleoside triphosphates to the 3′-end of nucleic acids and removing substrate biases during the incorporation of modified nucleoside triphosphates. The modification of FARHERKMLLDRHA to WARHERKMILDNHA, FARHERKMILDNHA, WARHERKMLLDNHA, FARHERKMLLDRHA, or FARHEKKMLLDNHA is also advantageous for the incorporation of 3′-O-modified nucleoside triphosphates to the 3′-end of nucleic acids and removing substrate biases during the incorporation of modified nucleoside triphosphates.

[0125] The modification can be selected from one or more of the following sequences FRRA, QADKA, EADA, MPP, FARHERKMLLDRHA, and YIPP. Included is a modified terminal deoxynucleotidyl transferase (TdT) enzyme wherein the second modification is selected from two or more of the following sequences FRRA, QADKA, EADA, MPP, FARHERKMLLDRHA, and YIPP. Included is a modified terminal deoxynucleotidyl transferase (TdT) enzyme wherein the second modification contains each of the following sequences FRRA, QADKA, EADA, MPP, FARHERKMLLDRHA, and YIPP.

[0126] Crystal structures shown herein show the following domains, which may be preferred as domains to modify:

[0127] FIG. 5. MENHNQI motif (152 to 158), which includes the ENHNQ motif

[0128] FIG. 6. SEGPCLAFMRA (175 to 185), which includes the FMRA motif, highlighted in black.

[0129] FIG. 7. HFTKMQK motif (275 to 281), which includes the MQK motif, highlighted in black.

[0130] FIG. 8. SAAVCK motif (291 to 296) highlighted in black.

[0131] FIG. 9. GKEC motif (328 to 331), which includes the KEC motif, highlighted in black.

[0132] FIG. 10. DHFQK motif (388 to 392), which includes the DHFQ motif, highlighted in black.

[0133] FIG. 11. FARHERKMLLDNHA motif (447 to 460) highlighted in black spheres. Additionally, motif FARHERKMLLDNHA is mutated to FARHERKMLLDRHA.

[0134] FIG. 12. FARHERKMLLDNHALYDKTKK motif (447 to 467) highlighted in black spheres. Additionally, motif FARHERKMLLDNHALYDKTKK is mutated to FARHERKMLLDRHALYDKTKK.

[0135] FIG. 13. DYIDP motif (485 to 489), which contains the YIDP motif, highlighted in black spheres.

[0136] FIG. 14. YYDIV motif (366 to 370) highlighted in black spheres.

[0137] FIG. 15. APPVDNF, which contains the APPVDN motif (421 to 427), motif highlighted in black spheres. In the structure, the APPVDNF motif is shown with an Ala to Met mutation to MPPVDNF.

[0138] In order to aid purification of the expressed sequence, the amino acid can be further modified. For example the amino acid sequence can contain one or more further histidine residues at the terminus. Included is a modified terminal deoxynucleotidyl transferase (TdT) enzyme comprising any one of SEQ ID NOs 4 to 173 or a truncated version thereof. Sequences 4-173 are the full length sequences derived from the spotted gar. Included is a modified terminal deoxynucleotidyl transferase (TdT) enzyme comprising any one of SEQ ID NOs 174 to 343. Sequences 174 to 343 are N-truncated sequences as spotted gar/bovine chimeras. Sequences 344 to 727 are spotted Gar sequences in truncated form. Additionally, for these sequences, there is an N-terminal sequence that is incorporated simply as a protease cleavage site (MENLYFQG . . . ).

[0139] Also disclosed is a method of nucleic acid synthesis, which comprises the steps of:

[0140] (a) providing an initiator oligonucleotide;

[0141] (b) adding a 3′-blocked nucleoside triphosphate to said initiator oligonucleotide in the presence of a terminal deoxynucleotidyl transferase (TdT) as defined herein;

[0142] (c) removal of all reagents from the initiator oligonucleotide;

[0143] (d) cleaving the blocking group in the presence of a cleaving agent; and

[0144] (e) removal of the cleaving agent.

[0145] The method can add greater than 1 nucleotide by repeating steps (b) to (e).

[0146] References herein to ‘nucleoside triphosphates’ refer to a molecule containing a nucleoside (i.e. a base attached to a deoxyribose or ribose sugar molecule) bound to three phosphate groups. Examples of nucleoside triphosphates that contain deoxyribose are: deoxyadenosine triphosphate (dATP), deoxyguanosine triphosphate (dGTP), deoxycytidine triphosphate (dCTP) or deoxythymidine triphosphate (dTTP). Examples of nucleoside triphosphates that contain ribose are: adenosine triphosphate (ATP), guanosine triphosphate (GTP), cytidine triphosphate (CTP) or uridine triphosphate (UTP). Other types of nucleosides may be bound to three phosphates to form nucleoside triphosphates, such as naturally occurring modified nucleosides and artificial nucleosides.

[0147] Therefore, references herein to ‘3′-blocked nucleoside triphosphates’ refer to nucleoside triphosphates (e.g., dATP, dGTP, dCTP or dTTP) which have an additional group on the 3′ end which prevents further addition of nucleotides, i.e., by replacing the 3′-OH group with a protecting group.

[0148] It will be understood that references herein to ‘3′-block’, ‘3′-blocking group’ or ‘3′-protecting group’ refer to the group attached to the 3′ end of the nucleoside triphosphate which prevents further nucleotide addition. The present method uses reversible 3′-blocking groups which can be removed by cleavage to allow the addition of further nucleotides. By contrast, irreversible 3′-blocking groups refer to dNTPs where the 3′-OH group can neither be exposed nor uncovered by cleavage.

[0149] The 3′-blocked nucleoside 5′-triphosphate can be blocked by any chemical group that can be unmasked to reveal a 3′-OH. The 3′-blocked nucleoside triphosphate can be blocked by a 3′-O-azidomethyl, 3′-aminooxy, 3′-O—(N-oxime) (3′-O—N═CR₁R₂, where R₁ and R₂ are each a C1-C3 alkyl group, for example CH₃, such that the oxime can be O—N═C(CH₃)₂ (N-acetoneoxime)), 3′-O-allyl group, 3′-O-cyanoethyl, 3′-O-acetyl, 3′-O-nitrate, 3′-phosphate, 3′-O-acetyl levulinic ester, 3′-O-tert butyl dimethyl silane, 3′-O-trimethyl(silyl)ethoxymethyl, 3′-O-ortho-nitrobenzyl, and 3′-O-para-nitrobenzyl.

[0150] The 3′-blocked nucleoside 5′-triphosphate can also be blocked by any chemical group that can be directly utilized in chemical ligations, such as copper-catalyzed or copper-free azide-alkyne click reactions and tetrazine-alkene click reactions. The 3′-blocked nucleoside triphosphate can include chemical moieties containing an azide, alkyne, alkene, and tetrazine.

[0151] References herein to ‘cleaving agent’ refer to a substance which is able to cleave the 3′-blocking group from the 3′-blocked nucleoside triphosphate. In one embodiment, the cleaving agent is a chemical cleaving agent. In an alternative embodiment, the cleaving agent is an enzymatic cleaving agent. The cleaving can be done in a single step, or can be a multi-step process, for example to transform an oxime (such as for example 3′-O—(N-oxime), 3′-O—N═C(CH₃)₂, into aminooxy (O—NH₂), followed by cleaving the aminooxy to OH.

[0152] It will be understood by the person skilled in the art that the selection of cleaving agent is dependent on the type of 3′-nucleotide blocking group used. For instance, tris(2-carboxyethyl)phosphine (TCEP) or tris(hydroxypropyl)phosphine (THPP) can be used to cleave a 3′-O-azidomethyl group, palladium complexes can be used to cleave a 3′-O-allyl group, or sodium nitrite can be used to cleave a 3′-aminooxy group. Therefore, in one embodiment, the cleaving agent is selected from: tris(2-carboxyethyl)phosphine (TCEP), a palladium complex or sodium nitrite.

[0153] In one embodiment, the cleaving agent is added in the presence of a cleavage solution comprising a denaturant, such as urea, guanidinium chloride, formamide or betaine. The addition of a denaturant has the advantage of being able to disrupt any undesirable secondary structures in the DNA. In a further embodiment, the cleavage solution comprises one or more buffers. It will be understood by the person skilled in the art that the choice of buffer is dependent on the exact cleavage chemistry and cleaving agent required.

[0154] References herein to an ‘initiator oligonucleotide’ or ‘initiator sequence’ refer to a short oligonucleotide with a free 3′-end which the 3′-blocked nucleoside triphosphate can be attached to. In one embodiment, the initiator sequence is a DNA initiator sequence. In an alternative embodiment, the initiator sequence is an RNA initiator sequence.

[0155] References herein to a ‘DNA initiator sequence’ refer to a small sequence of DNA which the 3′-blocked nucleoside triphosphate can be attached to, i.e., DNA will be synthesised from the end of the DNA initiator sequence.

[0156] In one embodiment, the initiator sequence is between 5 and 50 nucleotides long, such as between 5 and 30 nucleotides long (i.e. between 10 and 30), in particular between 5 and 20 nucleotides long (i.e., approximately 20 nucleotides long), more particularly 5 to 15 nucleotides long, for example 10 to 15 nucleotides long, especially 12 nucleotides long.

[0157] In one embodiment, the initiator sequence is single-stranded. In an alternative embodiment, the initiator sequence is double-stranded. It will be understood by persons skilled in the art that a 3′-overhang (i.e., a free 3′-end) allows for efficient addition.

[0158] In one embodiment, the initiator sequence is immobilised on a solid support. This allows TdT and the cleaving agent to be removed (in steps (c) and (e), respectively) without washing away the synthesised nucleic acid. The initiator sequence may be attached to a solid support stable under aqueous conditions so that the method can be easily performed via a flow setup.

[0159] In one embodiment, the initiator sequence is immobilised on a solid support via a reversible interacting moiety, such as a chemically-cleavable linker, an antibody/immunogenic epitope, a biotin/biotin binding protein (such as avidin or streptavidin), or glutathione-GST tag. Therefore, in a further embodiment, the method additionally comprises extracting the resultant nucleic acid by removing the reversible interacting moiety in the initiator sequence, such as by incubating with proteinase K.

[0160] In one embodiment, the initiator sequence contains a base or base sequence recognisable by an enzyme. A base recognised by an enzyme, such as a glycosylase, may be removed to generate an abasic site which may be cleaved by chemical or enzymatic means. A base sequence may be recognised and cleaved by a restriction enzyme.

[0161] In a further embodiment, the initiator sequence is immobilised on a solid support via a chemically-cleavable linker, such as a disulfide, allyl, or azide-masked hemiaminal ether linker. Therefore, in one embodiment, the method additionally comprises extracting the resultant nucleic acid by cleaving the chemical linker through the addition of tris(2-carboxyethyl)phosphine (TCEP) or dithiothreitol (DTT) for a disulfide linker; palladium complexes or an allyl linker; or TCEP for an azide-masked hemiaminal ether linker.

[0162] In one embodiment, the resultant nucleic acid is extracted and amplified by polymerase chain reaction using the nucleic acid bound to the solid support as a template. The initiator sequence could therefore contain an appropriate forward primer sequence and an appropriate reverse primer could be synthesised.

[0163] In one embodiment, the terminal deoxynucleotidyl transferase (TdT) of the invention is added in the presence of an extension solution comprising one or more buffers (e.g., Tris or cacodylate), one or more salts (e.g., Na⁺, K⁺, Mg²⁺, Mn²⁺, Cu²⁺, Zn²⁺, Co²⁺, etc. all with appropriate counterions, such as Cl) and inorganic pyrophosphatase (e.g., the Saccharomyces cerevisiae homolog). It will be understood that the choice of buffers and salts depends on the optimal enzyme activity and stability. The use of an inorganic pyrophosphatase helps to reduce the build-up of pyrophosphate due to nucleoside triphosphate hydrolysis by TdT. Therefore, the use of an inorganic pyrophosphatase has the advantage of reducing the rate of (1) backwards reaction and (2) TdT strand dismutation.

[0164] In one embodiment, step (b) is performed at a pH range between 5 and 10. Therefore, it will be understood that any buffer with a buffering range of pH 5-10 could be used, for example cacodylate, Tris, HEPES or Tricine, in particular cacodylate or Tris.

[0165] In one embodiment, step (d) is performed at a temperature less than 99° C., such as less than 95° C., 90° C., 85° C., 80° C., 75° C., 70° C., 65° C., 60° C., 55° C., 50° C., 45° C., 40° C., 35° C., or 30° C. It will be understood that the optimal temperature will depend on the cleavage agent utilised. The temperature used helps to assist cleavage and disrupt any secondary structures formed during nucleotide addition.

[0166] In one embodiment, steps (c) and (e) are performed by applying a wash solution. In one embodiment, the wash solution comprises the same buffers and salts as used in the extension solution described herein. This has the advantage of allowing the wash solution to be collected after step (c) and recycled as extension solution in step (b) when the method steps are repeated.

[0167] Also disclosed is a kit comprising a terminal deoxynucleotidyl transferase (TdT) as defined herein in combination with an initiator sequence and one or more 3′-blocked nucleoside triphosphates.

[0168] The invention includes the nucleic acid sequence used to express the modified terminal transferase. Included within the invention are the codon-optimized cDNA sequences which express the modified terminal transferase. Included are the codon-optimized cDNA sequences for each of the protein variants (SEQ ID NOs 4-727).

[0169] The nucleic acid sequence may be the sequence below (ID 728):

ATGCTGCATATTCCGATTTTCCCGCCGATTAAGAAGCGCCAGAAGCTGCC
GGAGAGCAGAAATTCCTGCAAATATGAAGTCAAGTTCTCTGAAGTTGCGA
TTTTCCTGGTTGAGCGCAAGATGGGTAGCAGCCGTCGCAAGTTTCTGACC
AACCTGGCGCGTAGCAAGGGCTTTCGTATCGAAGATGTTTTGAGCGATGC
GGTGACCCACGTTGTCGCCGAGGACAACAGCGCGGACGAGCTGTGGCAGT
GGCTCCAAAATTCCAGCCTGGGTGATCTGTCCAAAATTGAAGTCCTGGAC
ATTTCATGGTTCACCGAGTGTATGGGTGCCGGTAAACCTGTGCAAGTCGA
GGCCCGTCACTGCCTGGTCAAGAGCTGTCCGGTGATCGATCAGTACCTTG
AGCCATCCACGGTTGAAACGGTCAGCCAATATGCGTGCCAACGTCGTACG
ACCATGGAGAACCATAACCAGATTTTCACGGACGCATTTGCCATCCTGGC
GGAGAATGCTGAGTTTAACGAGAGCGAGGGTCCGTGCCTGGCGTTTATGC
GTGCAGCTAGCCTGCTGAAATCGTTGCCGCACGCAATTTCTAGCAGCAAA
GACCTGGAAGGTCTGCCGTGCCTGGGCGACCAGACGAAAGCCGTAATCGA
GGACATCTTAGAATACGGTCAGTGCAGCAAAGTTCAAGATGTGTTGTGTG
ATGACCGTTACCAGACCATCAAACTGTTCACGAGCGTTTTTGGCGTGGGC
CTGAAAACTGCAGAGAAGTGGTACCGCAAGGGTTTCCACTCTCTGGAAGA
AGTGCAAGCGGATAATGCGATCCATTTCACGAAAATGCAAAAAGCGGGCT
TCCTGTACTATGATGACATTAGCGCAGCAGTTTGTAAGGCTGAGGCCCAA
GCGATCGGTCAGATCGTCGAAGAGACTGTGCGTCTGATCGCACCGGATGC
GATTGTCACCCTGACGGGCGGTTTTCGCCGTGGTAAAGAGTGCGGTCACG
ACGTTGACTTTCTGATCACCACCCCGGAAATGGGCAAAGAAGTGTGGCTG
CTGAATCGTCTGATTAACCGTCTGCAGAATCAGGGTATTCTGTTGTATTA
TGACATTGTTGAGAGCACCTTCGACAAAACCCGTCTGCCGTGTCGCAAGT
TCGAGGCAATGGACCATTTTCAGAAGTGCTTTGCGATCATTAAGTTGAAG
AAAGAACTGGCGGCTGGCCGTGTGCAAAAAGACTGGAAAGCGATCCGTGT
TGATTTCGTGGCTCCGCCGGTCGACAATTTCGCCTTTGCATTGCTGGGTT
GGACCGGTAGCCGTCAGTTCGAGCGTGATCTGCGCCGCTTTGCGCGCCAC
GAACGTAAGATGCTGCTGGATAACCATGCACTGTACGATAAGACCAAAAA
GATTTTCCTGCCGGCCAAAACCGAAGAAGATATCTTTGCGCACCTGGGCT
TGGACTACATCGATCCATGGCAACGCAACGCGTAATGA

[0170] The invention includes a cell line producing the modified terminal transferase.

### Examples

[0171] Expression of TdT Variants

[0172] Briefly, plasmids containing genes encoding terminal transferase enzymes were transformed into BL21 E. coli competent cells. Starter Luria broth (LB) cultures were grown overnight at 37° C. and inoculated into LB expression cultures. Expression cultures were grown to an optical density of 0.6 at 600 nm and induced by the addition of IPTG to 1 mM. Cultures were induced and grown overnight at 25° C. The following morning, cultures were lysed in a detergent lysis buffer and purified to homogeneity by immobilized metal affinity chromatography (IMAC).

[0173] Assaying the Incorporation of Reversible Terminators by TdT Variants

[0174] 173 terminal transferase enzymes were expressed, purified, and compared against wild-type bovine TdT (SEQ ID NO 2). Purified engineered TdTs were then used in the following assays: a fluorescently labeled 15-nt ssDNA primer was incubated with 1×TdT buffer (Thermo Fisher Scientific), yeast inorganic pyrophosphatase (Sigma-Aldrich, 0.1 mU/μl), 3′-azidomethyl dTTP or 3′-aminooxy dATP, and engineered TdT (24 μg/μl) for 10 min at 37° C. Formamide (Fisher Scientific) was then used to quench the reaction, and samples were directly loaded onto and analysed by denaturing polyacrylamide gel electrophoresis. Gels were imaged and resulting gel bands were quantified with a Typhoon scanner (GE).

[0175] The results from the 173 TdT enzymes (SEQ ID NOs 1-173) are shown in FIG. 1.

[0176] Assaying the Incorporation of Base-Modified Reversible Terminators by TdT Variants

[chemical structure]

[0177] 192 terminal deoxynucleotidyl transferases (TdT) variants were expressed and purified as described above. The expressed variants had SEQ ID NOs:

[0178] 345, 347, 352, 357, 359, 360, 361, 362, 364, 365, 366, 367, 368, 370, 371, 372, 375, 376, 377, 378, 380, 382, 383, 384, 385, 387, 388, 392, 393, 394, 395, 397, 398, 399, 401, 405, 406, 410, 411, 416, 418, 422, 426, 427, 430, 433, 436, 439, 440, 442, 444, 445, 446, 447, 450, 453, 454, 455, 457, 460, 461, 462, 463, 464, 467, 472, 473, 475, 476, 477, 478, 479, 480, 485, 486, 487, 489, 492, 494, 495, 497, 499, 500, 503, 505, 506, 507, 509, 510, 514, 516, 517, 519, 524, 525, 526, 527, 528, 529, 531, 532, 533, 535, 543, 544, 546, 550, 553, 555, 557, 559, 560, 561, 562, 564, 565, 567, 568, 570, 572, 573, 575, 580, 582, 584, 589, 593, 595, 598, 599, 600, 601, 604, 605, 606, 609, 611, 612, 614, 618, 619, 620, 623, 629, 637, 638, 639, 641, 643, 644, 646, 648, 649, 651, 652, 654, 657, 658, 660, 661, 662, 664, 665, 666, 667, 670, 673, 678, 679, 681, 684, 685, 687, 690, 692, 698, 699, 700, 703, 706, 707, 708, 711, 712, 715, 716, 717, 718, 720, 721, 722, 725.

[0179] The base-modified reversibly terminators A*, C*, G*, and T* were supplied as substrates to engineered variants in a single nucleotide incorporation assay. A pool of DNA initiators with degenerate ends ( . . . NNN, where N=A, C, G, T) was immobilised to a solid support and exposed to nucleotide addition mixture (NAM) solutions containing (1) a TdT variant, (2) neutral pH buffer, (3) monovalent salt, (4) cobalt chloride, and (5) 3′-ONH₂-dXTP, where X is the modified nucleobase resulting in A*, C*, G*, or T*. The incubation temperature was 37° C. and the reaction time was 2.5 minutes. The solid support was then washed with a high salt solution at neutral pH followed by a low salt solution at neutral pH. The initiator pools transformed into sequencing libraries and analysed by next-generation sequencing (NGS) on an Illumina NextSeq500 with paired-end 30 cycle reads (PE30 reads). Bcl files were converted to fastq files with Illumina's bcl2fastq conversion software and analysed in R. The incorporation efficiency ([reads containing N+1 product]/{[reads containing N initiator]+[reads containing N+1 product]}) was calculated for the addition of each modified base against to all possible initiator contexts. The average incorporation efficiency across all contexts is presented in FIG. 3 (top panel). Wild-type bovine and spotted gar TdT activities as it relates to the single nucleotide incorporation of the base-modified reversibly terminated nucleotides A*, C*, G*, and T* are indicated by the dotted line. The dotted line occurs at y=0 due to the inability of wild-type bovine or spotted gar TdTs to incorporate these base-modified reversibly terminated nucleotides in our assay. All of the presented mutations in the TdT variants resulted in improvements in TdT modified-base incorporation relative to wild-type bovine and wild-type spotted gar TdTs.

[0180] Assaying the Multicycling Capabilities of TdT Variants

[0181] Solid support synthesis of an 8-nt nucleic acid sequence using 3′-ONH₂ nucleoside 5′-triphosphates with terminal deoxynucleotidyl transferase (TdT) SEQ ID NOs 1 & 344-727. The TdT variants were expressed and purified as described above. The DNA sequence 5′-ATCGATCG-3′ was synthesized by repeated exposure of a solid support bound DNA initiator to nucleotide addition mixture (NAM) solutions containing (1) TdT, (2) neutral pH buffer, (3) monovalent salt, (4) cobalt chloride, and (5) 3′-ONH₂-dNTP, where N is selected from adenine, thymine, cytosine, or guanine. A cycle consists of the following: (A) NAM solution with a specified A, T, C, or G reversibly terminated nucleotide were incubated for 5 minutes on the solid support at 37° C.; (B) the solid support was then washed with a high salt solution at neutral pH; (C) the solid support was then exposed to acidic aqueous sodium nitrite; and (D) the solid support was then washed with the same high salt solution at neutral pH from (B). (A)-(D) were then repeated 7 more times to synthesize the desired 8-nt sequence. Synthesized DNA were analysed by running reactions on a denaturing polyacrylamide gel and quantified by virtue of a fluorophore covalently attached to the DNA initiator. The fraction full length (8-nt species) was determined by taking fluorescence intensity of the 8-nt band and dividing by total lane intensity. Wild-type bovine and spotted gar TdT activities as it relates to fraction full-length are indicated by the dotted line at y=0 indicating that they are incapable of synthesizing any 8-nt product. All mutations included in the TdT variants resulted in improvements in TdT relative to wild-type bovine and spotted gar TdTs. Results are shown in FIG. 3 (bottom panel).

1. A modified terminal deoxynucleotidyl transferase (TdT) enzyme comprising amino acid modifications when compared to a wild type sequence SEQ ID NO 1 or a truncated version thereof or the homologous amino acid sequence of a terminal deoxynucleotidyl transferase (TdT) enzyme in other species or the homologous amino acid sequence of Polμ, Polβ, Polλ, and Polθ of any species or the homologous amino acid sequence of X family polymerases of any species, wherein the amino acid is modified at one or more of the amino acids:
V32, A33, I34, F35, A53, V68, V71, E97, I101, M108, G109, A110, Q115, V116, S125, T137, Q143, M152, E153, N154, H155, N156, Q157, I158, I165, N169, N173, S175, E176, G177, P178, C179, L180, A181, F182, M183, R184, A185, L188, H194, A195, I196, S197, S198, S199, K200, E203, G204, D210, Q211, T212, K213, A214, I216, E217, D218, L220, Y222, V228, D230, Q238, T239, L242, L251, K260, G261, F262, H263, S264, L265, E267, Q269, A270, D271, N272, A273, H275, F276, T277, K278, M279, Q280, K281, S291, A292, A293, V294, C295, K296, E298, A299, Q300, A301, Q304, I305, T309, V310, R311, L312, I313, A314, I318, V319, T320, G328, K329, E330, C331, L338, T341, P342, E343, M344, G345, K346, W349, L350, L351, N352, R353, L354, I355, N356, R357, L358, Q359, N360, Q361, G362, I363, L364, L365, Y366, Y367, D368, I369, V370, K376, T377, C381, K383, D388, H389, F390, Q391, K392, F394, I397, K398, K400, K401, E402, L403, A404, A405, G406, R407, D411, A421, P422, P423, V424, D425, N426, F427, A430, R438, F447, A448, R449, H450, E451, R452, K453, M454, L455, L456, D457, N458, H459, A460, L461, Y462, D463, K464, T465, K466, K467, T474, D477, D485, Y486, I487, D488, P489.

2. A modified terminal deoxynucleotidyl transferase (TdT) enzyme according to claim 1 comprising at least one amino acid modification when compared to a wild type sequence or a truncated version thereof, wherein the modification is selected from one or more of the amino acid regions WLLNRLINRLQNQGILLYYDIV, VAIF, MGA, MENHNQI, SEGPCLAFMRA, HAISSS, DQTKA, KGFHS, QADNA, HFTKMQK, SAAVCK, EAQA, TVRLI, GKEC, TPEMGK, DHFQK, LAAG, APPVDNF, FARHERKMLLDNHALYDKTKK, and DYIDP of the sequence of SEQ ID NO 1 or the homologous regions in other species or the homologous regions of Polμ, Polβ, Polλ, and Polθ of any species or the homologous regions of X family polymerases of any species.

3. A modified terminal deoxynucleotidyl transferase (TdT) enzyme according to claim 1 comprising at least one amino acid modification when compared to a wild type sequence SEQ ID NO 1 or the homologous amino acid sequence of a terminal deoxynucleotidyl transferase (TdT) enzyme in other species, wherein the modification is selected from one or more of the amino acid regions WLLNRLINRLQNQGILLYYDI, VAIF, MGA, ENHNQ, FMRA, HAI, TKA, FHS, QADNA, MQK, SAAVCK, EAQA, TVR, KEC, TPEMGK, DHFQ, LAAG, APPVDN, FARHERKMLLDNHA, and YIDP of the sequence of SEQ ID NO 1 or the homologous regions in other species.

4. A modified terminal deoxynucleotidyl transferase (TdT) enzyme according to any one of claims 1 to 3 comprising at least the sequence:
TVSQYACQRRTTMENHNQIFTDAFAILAENAEFNESEGPCLAFMRAASLL
KSLPHAISSSKDLEGLPCLGDQTKAVIEDILEYGQCSKVQDVLCDDRYQT
IKLFTSVFGVGLKTAEKWYRKGFHSLEEVQADNAIHFTKMQKAGFLYYDD
ISAAVCKAEAQAIGQIVEETVRLIAPDAIVTLTGGFRRGKECGHDVDFLI
TTPEMGKEVWLLNRLINRLQNQGILLYYDIVESTFDKTRLFCRKFEAMDH
FQKCFAIIKLKKELAAGRVQKDWKAIRVDFVAPPVDNFAFALLGWTGSRQ
FERDLRRFARHERKMLLDNHALYDKTKKIFLPAKTEEDIFAHLGLDYIDP
WQRNA
or the homologous regions in other species or the homologous regions of Polμ, Polβ, Polλ, and Polθ of any species or the homologous regions of X family polymerases of any species, wherein the sequence has one or more amino acid modifications in one or more of the amino acid regions WLLNRLINRLQNQGILLYYDIV, MENHNQI, SEGPCLAFMRA, HAISSS, DQTKA, KGFHS, QADNA, HFTKMQK, SAAVCK, EAQA, TVRLI, GKEC, TPEMGK, DHFQK, LAAG, APPVDNF, FARHERKMLLDNHALYDKTKK, and DYIDP of the sequence.

5. A modified terminal deoxynucleotidyl transferase (TdT) enzyme according to any one of claims 1 to 4 comprising at least two amino acid modifications when compared to a wild type sequence SEQ ID NO 1 or the homologous amino acid sequence of a terminal deoxynucleotidyl transferase (TdT) enzyme in other species, wherein;
a. a first modification is within the amino acid region WLLNRLINRLQNQGILLYYDIV of the sequence of SEQ ID NO 1 or the homologous region in other species; and
b. a second modification is selected from one or more of the amino acid regions VAIF, MGA, ENHNQ FMRA, HAI, TKA, FHS, QADNA, MQK, SAAVCK, EAQA, TVR, KEC, TPEMGK, DHFQ, LAAG, APPVDN, FARHERKMLLDNHA, and YIDP of the sequence of SEQ ID NO 1 or the homologous regions in other species.

6. The modified terminal deoxynucleotidyl transferase (TdT) enzyme according to claim 5 wherein the modification in amino acid region WLLNRLINRLQNQGILLYYDIV improves the enzyme solubility and the modification(s) in VAIF, MGA, ENHNQ, FMRA, HAI, TKA, FHS, QADNA, MQK, SAAVCK, EAQA, TVR, KEC, TPEMGK, DHFQ, LAAG, APPVDN, FARHERKMLLDNHA, and YIDP improves the incorporation of nucleotides having a modification at the 3′ position in comparison to the wild type sequence.

7. A modified terminal deoxynucleotidyl transferase (TdT) enzyme according to any one of claims 1 to 6 wherein the wild type sequence is selected from

| | |
|---|---|
| gi\|768 | Bos taurus |
| gi\|460163 | Gallus gallus |
| gi\|494987 | Xenopus laevis |
| gi\|1354475 | Oncorhynchus mykiss |
| gi\|2149634 | Monodelphis domestica |
| gi\|12802441 | Mus musculus |
| gi\|28852989 | Ambystoma mexicanum |
| gi\|38603668 | Takifugu rubripes |
| gi\|40037389 | Raja eglanteria |
| gi\|40218593 | Ginglymostoma cirratum |
| gi\|46369889 | Danio rerio |
| gi\|73998101 | Canis lupus familiaris |
| gi\|139001476 | Lemur catta |
| gi\|139001490 | Microcebus murinus |
| gi\|139001511 | Otolemur garnettii |
| gi\|148708614 | Mus musculus |
| gi\|149040157 | Rattus norvegicus |
| gi\|149704611 | Equus caballus |
| gi\|164451472 | Bos taurus |
| gi\|169642654 | Xenopus (Silurana) tropicalis |
| gi\|291394899 | Oryctolagus cuniculus |
| gi\|291404551 | Oryctolagus cuniculus |
| gi\|301763246 | Ailuropoda melanoleuca |
| gi\|311271684 | Sus scrota |
| gi\|327280070 | Anolis carolinensis |
| gi\|334313404 | Monodelphis domestica |
| gi\|344274915 | Loxodonta africana |
| gi\|345330196 | Ornithorhynchus anatinus |
| gi\|348588114 | Cavia porcellus |
| gi\|351697151 | Heterocephalus glaber |
| gi\|355562663 | Macaca mulatta |
| gi\|395501816 | Sarcophilus harrisii |
| gi\|395508711 | Sarcophilus harrisii |
| gi\|395850042 | Otolemur garnettii |
| gi\|397467153 | Pan paniscus |
| gi\|403278452 | Saimiri boliviensis boliviensis |
| gi\|410903980 | Takifugu rubripes |
| gi\|410975770 | Felis catus |
| gi\|432092624 | Myotis davidii |
| gi\|432113117 | Myotis davidii |
| gi\|444708211 | Tupaia chinensis |
| gi\|460417122 | Pleurodeles waltl |
| gi\|466001476 | Orcinus orca |
| gi\|471358897 | Trichechus manatus latirostris |
| gi\|478507321 | Ceratotherium simum simum |
| gi\|478528402 | Ceratotherium simum simum |
| gi\|488530524 | Dasypus novemcinctus |
| gi\|499037612 | Maylandia zebra |
| gi\|504135178 | Ochotona princeps |
| gi\|505844004 | Sorex araneus |
| gi\|505845913 | Sorex araneus |
| gi\|507537868 | Jaculus jaculus |
| gi\|507572662 | Jaculus jaculus |
| gi\|507622751 | Octodon degus |
| gi\|507640406 | Echinops telfairi |
| gi\|507669049 | Echinops telfairi |
| gi\|507930719 | Condylura cristata |
| gi\|507940587 | Condylura cristata |
| gi\|511850623 | Mustela putorius furo |
| gi\|512856623 | Xenopus (Silurana) tropicalis |
| gi\|512952456 | Heterocephalus glaber |
| gi\|524918754 | Mesocricetus auratus |
| gi\|527251632 | Melopsittacus undulatus |
| gi\|528493137 | Danio rerio |
| gi\|528493139 | Danio rerio |
| gi\|529438486 | Falco peregrinus |
| gi\|530565557 | Chrysemys picta bellii |
| gi\|532017142 | Microtus ochrogaster |
| gi\|532099471 | Ictidomys tridecemlineatus |
| gi\|533166077 | Chinchilla lanigera |
| gi\|533189443 | Chinchilla lanigera |
| gi\|537205041 | Cricetulus griseus |
| gi\|537263119 | Cricetulus griseus |
| gi\|543247043 | Geospiza fortis |
| gi\|543351492 | Pseudopodoces humilis |
| gi\|543731985 | Columba livia |
| gi\|544420267 | Macaca fascicularis |
| gi\|545193630 | Equus caballus |
| gi\|548384565 | Pundamilia nyererei |
| gi\|551487466 | Xiphophorus maculatus |
| gi\|551523268 | Xiphophorus maculatus |
| gi\|554582962 | Myotis brandtii |
| gi\|554588252 | Myotis brandtii |
| gi\|556778822 | Pantholops hodgsonii |
| gi\|556990133 | Latimeria chalumnae |
| gi\|557297894 | Alligator sinensis |
| gi\|558116760 | Pelodiscus sinensis |
| gi\|558207237 | Myotis lucifugus |
| gi\|560895997 | Camelus ferus |
| gi\|560897502 | Camelus ferus |
| gi\|562857949 | Tupaia chinensis |
| gi\|562876575 | Tupaia chinensis |
| gi\|564229057 | Alligator mississippiensis |
| gi\|564236372 | Alligator mississippiensis |
| gi\|564384286 | Rattus norvegicus |

8. A modified terminal deoxynucleotidyl transferase (TdT) enzyme according to any one of claims 1 to 7 wherein the modification within the amino acid region WLLNRLINRLQNQGILLYYDIV is at one or more of the underlined amino acids.

9. A modified terminal deoxynucleotidyl transferase (TdT) enzyme according to claim 8 wherein the modification within the amino acid region WLLNRLINRLQNQGILLYYDIV is to QLLPKVINLWEKKGLLLYYDLV.

10. A modified terminal deoxynucleotidyl transferase (TdT) enzyme according to any one of claims 1 to 9 wherein the modification is selected from one or more of the amino acid regions VAIF, MGA, ENHNQ, FMRA, HAI, TKA, FHS, QADNA, MQK, SAAVCK, EAQA, TVR, KEC, TPEMGK, DHFQ, LAAG, APPVDN, FARHERKMLLDNHA, and YIDP.

11. A modified terminal deoxynucleotidyl transferase (TdT) enzyme according to any one of claims 1 to 9 wherein the modification is selected from one or more of the amino acids A53, V68, V71, E97, I101, G109, Q115, V116, S125, T137, Q143, N154, H155, Q157, I158, I165, G177, L180, A181, M183, A195, K200, T212, K213, A214, E217, T239, F262, S264, Q269, N272, A273, K281, S291, K296, Q300, T309, R311, E330, T341, E343, G345, N352, N360, Q361, I363, Y367, H389, L403, G406, D411, A421, P422, V424, N426, R438, F447, R452, L455, and/or D488.

12. A modified terminal deoxynucleotidyl transferase (TdT) enzyme according to any one of claims 1 to 9 wherein the modification is selected from one or more of the amino acid changes A53G, V68I, V71I, E97A, I101V, G109E, G109R, Q115E, V116I, V116S, S125R, T137A, Q143P, M152L, M152T, N154H, H155C, H155N, H155R, Q157K, Q157R, I158V, I158L, I158M, I165V, N169R, N173R, S175N, G177S, G177V, G177D, C179A, C179S, L180V, A181E, M183R, L188V, A195T, A195P, S197I, S197L, S198R, S198C, S199L, K200R, E203Q, G204D, D210E, Q211R, T212S, K213S, A214R, A214C, A214G, I216M, E217Q, D218E, L220I, L220F, L220Y, Y222C, V228A, D230E, Q238K, T239S, L242Q, L251P, K260M, F262L, L265F, S264T, E267D, Q269K, D271N, D271E, N272K, A273S, A273T, H275Q, T277S, K281R, S291N, S291T, K296R, Q300D, Q304R, Q304C, Q304H, I305V, T309A, R311W, R311H, I312G, L312K, L312A, I313M, A314T, I318L, V319L, T320A, G328A, E330N, E330S, C331I, L338I, T341S, P342A, E343G, E343Q, M344A, M344Q, M344K, G345R, K346R, N352Q, K353R, K353D, V354I, V354L, I355V, I355M, N356R, N356D, W358L, N360K, Q361K, G362E, I363L, Y366F, Y367C, D368H, D368E, V370I, K376I, T377S, T377L, T377A, C381S, K383R, H389N, H389A, K392Q, F394W, I397L, K398R, K400E, K400N, K401A, K401Q, E402Q, L403Q, L403R, A405D, G406R, R407C, D411N, A421L, A421M, A421V, P422A, P422C, V424Y, V424I, V424A, N426R, N426C, F427Y, A430T, R438K, F447W, R452K, L455I, K453R, Y462F, K464R, T465R, K467R, T474S, D477E, D485E, I487V, and/or D488P.

13. A modified terminal deoxynucleotidyl transferase (TdT) enzyme according to claim 10 wherein the modification is selected from one or more of the amino acid regions FMRA, QADNA, EAQA, APPVDN, FARHERKMLLDNHA, and YIDP is at the underlined amino acid(s).

14. A modified terminal deoxynucleotidyl transferase (TdT) enzyme according to claim 13 wherein the modification is selected from one or more of the following sequences FRRA, QADKA, EADA, MPPVDN, FARHERKMLLDRHA, and YIPP.

15. A modified terminal deoxynucleotidyl transferase (TdT) enzyme according to claim 13 wherein the modification is selected from two or more of the following sequences FRRA, QADKA, EADA, MPPVDN, FARHERKMLLDRHA, and YIPP.

16. A modified terminal deoxynucleotidyl transferase (TdT) enzyme according to claim 15 wherein the modification contain each of the following sequences FRRA, QADKA, EADA, MPPVDN, FARHERKMLLDRHA, and YIPP.

17. A modified terminal deoxynucleotidyl transferase (TdT) enzyme according to any one of claims 1 to 16 comprising a sequence selected from SEQ ID NO 4 to SEQ ID NO 173 or a truncated version thereof.

18. A modified terminal deoxynucleotidyl transferase (TdT) enzyme according to any one of claims 1 to 16 comprising a sequence selected from SEQ ID NO 174 to SEQ ID NO 343.

19. A modified terminal deoxynucleotidyl transferase (TdT) enzyme according to any one of claims 1 to 16 comprising a sequence selected from SEQ ID NO 344 to 727.

20. A method of nucleic acid synthesis, which comprises the steps of:
(a) providing an initiator oligonucleotide;
(b) adding a 3′-blocked nucleoside triphosphate to said initiator oligonucleotide in the presence of a terminal deoxynucleotidyl transferase (TdT) as defined in any one of claims 1 to 19;
(c) removal of all reagents from the initiator oligonucleotide;
(d) cleaving the blocking group in the presence of a cleaving agent; and
(e) removal of the cleaving agent.

21. The method as defined in claim 20, wherein greater than 1 nucleotide is added by repeating steps (b) to (e).

22. The method as defined in claim 20 or claim 21 wherein the 3′-blocked nucleoside triphosphate is blocked a group selected from 3′-O-azidomethyl, 3′-aminooxy, 3′-O—(N-oxime), 3′-O-allyl 3′-O-cyanoethyl, 3′-O-acetyl, 3′-O-nitrate, 3′-phosphate, 3′-O-acetyl levulinic ester, 3′-O-tert butyl dimethyl silane, 3′-O-trimethyl(silyl)ethoxymethyl, 3′-O-ortho-nitrobenzyl, or 3′-O-para-nitrobenzyl.

23. The method as defined in claim 22 wherein the 3′-blocked nucleoside triphosphate is blocked by either a 3′-O-azidomethyl, 3′-aminooxy or 3′-O-allyl group.

24. A kit comprising a terminal deoxynucleotidyl transferase (TdT) as defined in any one of claims 1 to 19 in combination with an initiator oligonucleotide and one or more 3′-blocked nucleoside triphosphates.

The application's sequence listing, which the Patent Office published only in electronic form, follows.

SEQUENCE LISTING (729 sequences)

SEQ ID NO: 1 - protein, 494 aa, Lepisosteus oculatus
MLHIPIFPPIKKRQKLPESRNSCKYEVKFSEVAIFLVERKMGSSRRKFLTNLARSKGFRIEDVLSDAVTHVVAEDNSADELWQWLQNSSLGDLSKIEVLDISWFTECMGAGKPVQVEARHCLVKSCPVIDQYLEPSTVETVSQYACQRRTTMENHNQIFTDAFAILAENAEFNESEGPCLAFMRAASLLKSLPHAISSSKDLEGLPCLGDQTKAVIEDILEYGQCSKVQDVLCDDRYQTIKLFTSVFGVGLKTAEKWYRKGFHSLEEVQADNAIHFTKMQKAGFLYYDDISAAVCKAEAQAIGQIVEETVRLIAPDAIVTLTGGFRRGKECGHDVDFLITTPEMGKEVWLLNRLINRLQNQGILLYYDIVESTFDKTRLPCRKFEAMDHFQKCFAIIKLKKELAAGRVQKDWKAIRVDFVAPPVDNFAFALLGWTGSRQFERDLRRFARHERKMLLDNHALYDKTKKIFLPAKTEEDIFAHLGLDYIDPWQRNA

SEQ ID NO: 2 - protein, 509 aa, Bos taurus
MDPLCTASSGPRKKRPRQVGASMASPPHDIKFQNLVLFILEKKMGTTRRNFLMELARRKGFRVENELSDSVTHIVAENNSGSEVLEWLQVQNIRASSQLELLDVSWLIESMGAGKPVEITGKHQLVVRTDYSATPNPGFQKTPPLAVKKISQYACQRKTTLNNYNHIFTDAFEILAENSEFKENEVSYVTFMRAASVLKSLPFTIISMKDTEGIPCLGDKVKCIIEEIIEDGESSEVKAVLNDERYQSFKLFTSVFGVGLKTSEKWFRMGFRSLSKIMSDKTLKFTKMQKAGFLYYEDLVSCVTRAEAEAVGVLVKEAVWAFLPDAFVTMTGGFRRGKKIGHDVDFLITSPGSAEDEEQLLPKVINLWEKKGLLLYYDLVESTFEKFKLPSRQVDTLDHFQKCFLILKLHHQRVDSSKSNQQEGKTWKAIRVDLVMCPYENRAFALLGWTGSRQFERDIRRYATHERKMMLDNHALYDKTKRVFLKAESEEEIFAHLGLDYIEPWERNA

SEQ ID NO: 3 - protein, 530 aa, Mus musculus
MDPLQAVHLGPRKKRPRQLGTPVASTPYDIRFRDLVLFILEKKMGTTRRAFLMELARRKGFRVENELSDSVTHIVAENNSGSDVLEWLQLQNIKASSELELLDISWLIECMGAGKPVEMMGRHQLVVNRNSSPSPVPGSQNVPAPAVKKISQYACQRRTTLNNYNQLFTDALDILAENDELRENEGSCLAFMRASSVLKSLPFPITSMKDTEGIPCLGDKVKSIIEGIIEDGESSEAKAVLNDERYKSFKLFTSVFGVGLKTAEKWFRMGFRTLSKIQSDKSLRFTQMQKAGFLYYEDLVSCVNRPEAEAVSMLVKEAVVTFLPDALVTMTGGFRRGKMTGHDVDFLITSPEATEDEEQQLLHKVTDFWKQQGLLLYCDILESTFEKFKQPSRKVDALDHFQKCFLILKLDHGRVHSEKSGQQEGKGWKAIRVDLVMCPYDRRAFALLGWTGSRQFERDLRRYATHERKMMLDNHALYDRTKGKTVTISPLDGKVSKLQKALRVFLEAESEEEIFAHLGLDYIEPWERNA

SEQ ID NO: 4 - protein, 494 aa, Artificial Sequence
  Modified TdT Sequences
MLHIPIFPPIKKRQKLPESRNSCKYEVKFSELAIFLVERKMGSSRRKFLTNLARSKGFRIEDVLSDAITHVVAEDNSADELWQWLQNSSLGDLSKIEVLDISWFTECMEAGKPVQVEARHCLVKSCPVIDQYLEPSTVETVSQYACQRRTTMENHNQIFTDAFAILAENAEFNESEDPCLAFRRAASLLKSLPHAISSSKDLEGLPCLGDQTKAVIEDILEYGQCSKVQDVLCDDRYQTIKLFTSVFGVGLKTAEKWYRKGFHSLEEVQADKAIHFTKMQKAGFLYYDDISAAVCKAEADAIGQIVEETVRLIAPDAIVTLTGGFRRGKECGHDVDFLITTPEMGKEVWLLNRLINRLQNQGILLYYDIVESTFDKTRLPCRKFEAMDHFQKCFAIIKLKKELAAGRVQKDWKAIRVDFVMPPVDNFAFALLGWTGSRQFERDLRRFARHERKMLLDNHALYDKTKKIFLPAKTEEDIFAHLGLDYIPPWQRNA

SEQ ID NO: 5 - protein, 494 aa, Artificial Sequence
  Modified TdT Sequences
MLHIPIFPPIKKRQKLPESRNSCKYEVKFSEVAIFLVERKMGSSRRKFLTNLARSKGFRIEDVLSDAVTHVVAEDNSADELWQWLQNSSLGDLSKIEVLDISWFTECMGAGKPVEVEARHCLVKSCPVIDQYLEPSTVETVSQYACQRRTTMENHNQIFTDAFAILAENAEFNESEGPCLAFRRAASLLKSLPHAISSSKDLEGLPCLGDQTKAVIEDILEYGQCSKVQDVLCDDRYQTIKLFTSVFGVGLKTAEKWYRKGFHSLEEVQADNAIHFTKMQKAGFLYYDDISAAVCKAEAQAIGQIVEETVRLIAPDAIVTLTGGFRRGKECGHDVDFLITTPEMGKEVWLLNRLINRLQNQGILLYYDIVESTFDKTRLPCRKFEAMDHFQKCFAIIKLKKELAAGRVQKDWKAIRVDFVAPPVDNFAFALLGWTGSRQFERDLRRWARHERKMLLDNHALYDKTKKIFLPAKTEEDIFAHLGLDYIPPWQRNA

SEQ ID NO: 6 - protein, 494 aa, Artificial Sequence
  Modified TdT Sequences
MLHIPIFPPIKKRQKLPESRNSCKYEVKFSEVAIFLVERKMGSSRRKFLTNLARSKGFRIEDVLSDAVTHVVAEDNSADELWQWLQNSSLGDLSKIEVLDISWFTECMGAGKPVQVEARHCLVKSCPVIDQYLEPSTVETVSQYACQRRTTMENHNQIFTDAFAILAENAEFNESEGPCLAFRRAASLLKSLPHAISSSKDLEGLPCLGDQTKAVIEDILEYGQCSKVQDVLCDDRYQTIKLFTSVFGVGLKTAEKWYRKGFHTLEEVQADNAIHFTKMQKAGFLYYDDISAAVCKAEADAIGQIVEETVRLIAPDAIVTLTGGFRRGKECGHDVDFLITTPEMGKEVWLLNRLINRLQNQGILLYYDIVESTFDKTRLPCRKFEAMDHFQKCFAIIKLKKELAAGRVQKDWKAIRVDFVVCPVDNFAFALLGWTGSRQFERDLRRFARHERKMLLDNHALYDKTKKIFLPAKTEEDIFAHLGLDYIPPWQRNA

SEQ ID NO: 7 - protein, 494 aa, Artificial Sequence
  Modified TdT Sequences
MLHIPIFPPIKKRQKLPESRNSCKYEVKFSELAIFLVERKMGSSRRKFLTNLARSKGFRIEDVLSDAVTHVVAEDNSADELWQWLQNSSLGDLSKIEVLDISWFTECMEAGKPVQVEARHCLVKSCPVIDQYLEPSTVETVSPYACQRRTTMENHNQIFTDAFAILAENAEFNESEGPCLAFRRAASLLKSLPHAISSSKDLEGLPCLGDQTKAVIEDILEYGQCSKVQDVLCDDRYQTIKLFTSVFGVGLKTAEKWYRKGFHSLEEVQADKAIHFTKMQRAGFLYYDDISAAVCKAEADAIGQIVEETVRLIAPDAIVTLTGGFRRGKECGHDVDFLITTPEMGKEVWLLNRLINRLQNQGILLYYDIVESTFDKTRLPCRKFEAMDHFQKCFAIIKLKKELAAGRVQKDWKAIRVDFVMPPVDNFAFALLGWTGSRQFERDLRRFARHERKMLLDNHALYDKTKKIFLPAKTEEDIFAHLGLDYIPPWQRNA

SEQ ID NO: 8 - protein, 494 aa, Artificial Sequence
  Modified TdT Sequences
MLHIPIFPPIKKRQKLPESRNSCKYEVKFSEVAIFLVERKMGSSRRKFLTNLARSKGFRIEDVLSDAVTHVVAEDNSADELWQWLQNSSLGDLSKIEVLDISWFTECMGAGKPVQVEARHCLVKSCPVIDQYLEPSTVETVSQYACQRRTTMENHNQIFTDAFAILAENAEFNESEGPCLAFRRAASLLKSLPHAISSSKDLEGLPCLGDQTKAVIQDILEYGQCSKVQDVLCDDRYQTIKLFTSVFGVGLKTAEKWYRKGFHSLEEVQADNSIHFTKMQKAGFLYYDDISAAVCKAEADAIGQIVEETVRLIAPDAIVTLTGGFRRGKECGHDVDFLITTPEMGKEVWLLNRLINRLQNQGILLYYDIVESTFDKTRLPCRKFEAMDHFQKCFAIIKLKKELAAGRVQKDWKAIRVDFVAPPVDNFAFALLGWTGSRQFERDLRRFARHERKMILDNHALYDKTKKIFLPAKTEEDIFAHLGLDYIPPWQRNA

SEQ ID NO: 9 - protein, 494 aa, Artificial Sequence
  Modified TdT Sequences
MLHIPIFPPIKKRQKLPESRNSCKYEVKFSEVAIFLVERKMGSSRRKFLTNLARSKGFRIEDVLSDAVTHIVAEDNSADELWQWLQNSSLGDLSKIEVLDISWFTECMEAGKPVQVEARHCLVKSCPVIDQYLEPSTVETVSQYACQRRTTMENHNQIFTDAFAILAENAEFNESEGPCLAFRRAASLLKSLPHAISSSKDLEGLPCLGDQTKAVIEDILEYGQCSKVQDVLCDDRYQTIKLFTSVFGVGLKTAEKWYRKGFHSLEEVQADNAIHFTKMQKAGFLYYDDISAAVCKAEADAIGQIVEETVRLIAPDAIVTLTGGFRRGKECGHDVDFLITTPEMGKEVWLLNRLINRLQNQGILLYYDIVESTFDKTRLPCRKFEAMDHFQKCFAIIKLKKELAAGRVQKDWKAIRVDFVAPPVDNFAFALLGWTGSRQFERDLRRFARHEKKMLLDNHALYDKTKKIFLPAKTEEDIFAHLGLDYIPPWQRNA

SEQ ID NO: 10 - protein, 494 aa, Artificial Sequence
  Modified TdT Sequences
MLHIPIFPPIKKRQKLPESRNSCKYEVKFSEIAIFLVERKMGSSRRKFLTNLARSKGFRIEDVLSDAVTHVVAEDNSADELWQWLQNSSLGDLSKIEVLDISWFTECMEAGKPVQVEARHCLVKSCPVIDQYLEPSTVETVSQYACQRRTTMENHNQIFTDAFAILAENAEFNESEGPCLAFRRAASLLKSLPHAISSSKDLEGLPCLGDQTKAVIEDILEYGQCSKVQDVLCDDRYQTIKLFTSVFGVGLKTAEKWYRKGFHSLEEVQADKAIHFTKMQKAGFLYYDDISAAVCKAEADAIGQIVEETVRLIAPDAIVTLTGGFRRGKECGHDVDFLITTPEMGKEVWLLNRLINRLQNQGILLYYDIVESTFDKTRLPCRKFEAMDHFQKCFAIIKLKKELAAGRVQKNWKAIRVDFVMCPVDNFAFALLGWTGSRQFERDLRRFARHERKMLLDNHALYDKTKKIFLPAKTEEDIFAHLGLDYIPPWQRNA

SEQ ID NO: 11 - protein, 494 aa, Artificial Sequence
  Modified TdT Sequences
MLHIPIFPPIKKRQKLPESRNSCKYEVKFSEVAIFLVERKMGSSRRKFLTNLARSKGFRIEDVLSDAVTHVVAEDNSADELWQWLQNSSLGDLSKIEVLDISWFTECMGAGKPVQIEARHCLVKSCPVIDQYLEPSTVETVSQYACQRRTTMENHNQIFTDAFAILAENAEFNESEGPCLAFRRAASLLKSLPHAISSSKDLEGLPCLGDQTKAVIEDILEYGQCSKVQDVLCDDRYQTIKLFTSVFGVGLKTAEKWYRKGFHSLEEVQADNTIHFTKMQKAGFLYYDDISAAVCKAEAQAIGQIVEETVRLIAPDAIVTLTGGFRRGKECGHDVDFLITTPEMGKEVWLLNRLINRLQNQGILLYYDIVESTFDKTRLPCRKFEAMDHFQKCFAIIKLKKELAAGRVQKDWKAIRVDFVAPPVDNFAFALLGWTGSRQFERDLRRFARHERKMLLDNHALYDKTKKIFLPAKTEEDIFAHLGLDYIPPWQRNA

SEQ ID NO: 12 - protein, 494 aa, Artificial Sequence
  Modified TdT Sequences
MLHIPIFPPIKKRQKLPESRNSCKYEVKFSEVAIFLVERKMGSSRRKFLTNLARSKGFRIEDVLSDAVTHVVAEQNSADELWQWLQNSSLGDLSKIEVLDISWFTECMEAGKPVQVEARHCLVKSCPVIDQYLEPSTVETVSQYACQRRTTMENHNQIFTDAFAILAENAEFNESEGPCLAFRRAASLLKSLPHAISSSKDLEGLPCLGDQTKAVIEDILEYGQCSKVQDVLCDDRYQTIKLFTSVFGVGLKTAEKWYRKGFHSLEEVQADKAIHFTKMQKAGFLYYDDISAAVCKAEAQAIGQIVEETVRLIAPDAIVTLTGGFRRGKNCGHDVDFLITTPEMGKEVWLLNRLINRLQNQGILLYYDIVESTFDKTRLPCRKFEAMDHFQKCFAIIKLKKELAAGRVQKDWKAIRVDFVMPPVDNFAFALLGWTGSRQFERDLRRFARHERKMLLDNHALYDKTKKIFLPAKTEEDIFAHLGLDYIPPWQRNA

SEQ ID NO: 13 - protein, 494 aa, Artificial Sequence
  Modified TdT Sequences
MLHIPIFPPIKKRQKLPESRNSCKYEVKFSEVAIFLVERKMGSSRRKFLTNLARSKGFRIEDVLSDAVTHVVAEDNSADELWQWLQNSSLGDLSKIEVLDISWFTECMGAGKPVQVEARHCLVKSCPVIDQYLEPSTVETVSQYACQRRTTMENHNKIFTDAFAILAENAEFNESEGPCLAFRRAASLLKSLPHAISSSKDLEGLPCLGDQTKAVIEDILEYGQCSKVQDVLCDDRYQTIKLFTSVFGVGLKTAEKWYRKGLHSLEEVQADNTIHFTKMQKAGFLYYDDISAAVCKAEADAIGQIVEETVRLIAPDAIVTLTGGFRRGKECGHDVDFLITTPEMGKEVWLLNRLINRLQNQGILLYYDIVESTFDKTRLPCRKFEAMDHFQKCFAIIKLKKELAAGRVQKDWKAIRVDFVAPPVDNFAFALLGWTGSRQFERDLRRFARHERKMLLDNHALYDKTKKIFLPAKTEEDIFAHLGLDYIPPWQRNA

SEQ ID NO: 14 - protein, 494 aa, Artificial Sequence
  Modified TdT Sequences
MLHIPIFPPIKKRQKLPESRNSCKYEVKFSEVVIFLVERKMGSSRRKFLTNLARSKGFRIEDVLSDAVTHVVAEDNSADELWQWLQNSSLGDLSKIEVLDISWFTECMEAGKPVQVEARHCLVKSCPVIDQYLEPSAVETVSQYACQRRTTMENHNQIFTDAFAILAENAEFNESEGPCLAFRRAASLLKSLPHAISSSKDLEGLPCLGDQTKAVIEDILEYGQCSKVQDVLCDDRYQTIKLFTSVFGVGLKTAEKWYRKGFHSLEEVQADKAIHFTKMQRAGFLYYDDISAAVCKAEADAIGQIVEETVRLIAPDAIVTLTGGFRRGKECGHDVDFLITTPEMGKEVWLLNRLINRLQNQGILLYYDIVESTFDKTRLPCRKFEAMDHFQKCFAIIKLKKELAAGRVQKDWKAIRVDFVMPPVDNFAFALLGWTGSRQFERDLRRFARHERKMLLDNHALYDKTKKIFLPAKTEEDIFAHLGLDYIPPWQRNA

SEQ ID NO: 15 - protein, 494 aa, Artificial Sequence
  Modified TdT Sequences
MLHIPIFPPIKKRQKLPESRNSCKYEVKFSEVAIFLVERKMGSSRRKFLTNLARSKGFRIEDVLSDAVTHIVAEDNSADELWQWLQNSSLGDLSKIEVLDISWFTECMGAGKPVQVEARHCLVKSCPVIDQYLEPSTVETVSQYACQRRTTMEHHNQIFTDAFAILAENAEFNESEGPCLAFRRAASLLKSLPHAISSSKDLEGLPCLGDQTKAVIEDILEYGQCSKVQDVLCDDRYQTIKLFTSVFGVGLKTAEKWYRKGFHSLEEVQADNAIHFTKMQKAGFLYYDDISAAVCKAEADAIGQIVEETVRLIAPDAIVTLTGGFRRGKECGHDVDFLITSPEMGKEVWLLNRLINRLQNQGILLYYDIVESTFDKTRLPCRKFEAMDHFQKCFAIIKLKKELAAGRVQKDWKAIRVDFVAPPVDNFAFALLGWTGSRQFERDLRRFARHERKMLLDNHALYDKTKKIFLPAKTEEDIFAHLGLDYIPPWQRNA

SEQ ID NO: 16 - protein, 494 aa, Artificial Sequence
  Modified TdT Sequences
MLHIPIFPPIKKRQKLPESRNSCKYEVKFSEVAIFLVERKMGSSRRKFLTNLARSKGFRIEDVLSDAVTHVVAEDNSADELWQWLQNSSLGDLSKIEVLDISWFTECMGAGKPVQVEARHCLVKSCPVIDQYLEPSTVETVSQYACQRRTTMENHNQIFTDAFAVLAENAEFNESEGPCLAFRRAASLLKSLPHAISSSKDLEGLPCLGDQTKAVIQDILEYGQCSKVQDVLCDDRYQTIKLFTSVFGVGLKTAEKWYRKGFHSLEEVQADNAIHFTKMQKAGFLYYDDISAAVCKAEADAIGQIVEETVRLIAPDAIVTLTGGFRRGKECGHDVDFLITTPEMGKEVWLLNRLINRLQNQGILLYYDIVESTFDKTRLPCRKFEAMDHFQKCFAIIKLKKELAAGRVQKDWKAIRVDFVAPPVDNFAFALLGWTGSRQFERDLRRFARHERKMLLDNHALYDKTKKIFLPAKTEEDIFAHLGLDYIDPWQRNA

SEQ ID NO: 17 - protein, 494 aa, Artificial Sequence
  Modified TdT Sequences
MLHIPIFPPIKKRQKLPESRNSCKYEVKFSEVAIFLVERKMGSSRRAFLTNLARSKGFRIEDVLSDAVTHVVAEQNSADELWQWLQNSSLGDLSKIEVLDISWFTECMGAGKPVQVEARHCLVKSCPVIDQYLEPSTVETVSQYACQRRTTMENHNQIFTDAFAILAENAEFNESEGPCLAFRRAASLLKSLPHAISSSKDLEGLPCLGDQTKAVIEDILEYGQCSKVQDVLCDDRYQTIKLFTSVFGVGLKTAEKWYRKGFHSLEEVQADNAIHFTKMQKAGFLYYDDISAAVCKAEADAIGQIVEETVRLIAPDAIVTLTGGFRRGKECGHDVDFLITTPEMGKEVWLLNRLINRLQNQGILLYYDIVESTFDKTRLPCRKFEAMDHFQKCFAIIKLKKELAAGRVQKDWKAIRVDFVVPPVDNFAFALLGWTGSRQFERDLRRFARHERKMILDNHALYDKTKKIFLPAKTEEDIFAHLGLDYIPPWQRNA

SEQ ID NO: 18 - protein, 494 aa, Artificial Sequence
  Modified TdT Sequences
MLHIPIFPPIKKRQKLPESRNSCKYEVKFSEVAIFLVERKMGSSRRKFLTNLARSKGFRIEDVLSDAVTHVVAEQNSADELWQWLQNSSLGDLSKIEVLDISWFTECMEAGKPVQVEARHCLVKSCPVIDQYLEPSTVETVSQYACQRRTTMENCNQIFTDAFAILAENAEFNESEGPCLAFRRAASLLKSLPHAISSSKDLEGLPCLGDQTKAVIEDILEYGQCSKVQDVLCDDRYQTIKLFTSVFGVGLKTAEKWYRKGFHSLEEVQADKAIHFTKMQKAGFLYYDDISAAVCKAEADAIGQIVEETVRLIAPDAIVTLTGGFRRGKECGHDVDFLITTPEMGKEVWLLNRLINRLQNQGILLYYDIVESTFDKTRLPCRKFEAMDHFQKCFAIIKLKKELAAGRVQKNWKAIRVDFVMPPVDNFAFALLGWTGSRQFERDLRRFARHERKMLLDNHALYDKTKKIFLPAKTEEDIFAHLGLDYIPPWQRNA

SEQ ID NO: 19 - protein, 494 aa, Artificial Sequence
  Modified TdT Sequences
MLHIPIFPPIKKRQKLPESRNSCKYEVKFSEVAIFLVERKMGSSRRKFLTNLARSKGFRIEDVLSDAVTHVVAEDNSADELWQWLQNSSLGDLSKIEVLDISWFTECMEAGKPVQIEARHCLVKSCPVIDQYLEPSTVETVSQYACQRRTTMENHNQIFTDAFAILAENAEFNESEGPCLAFRRAASLLKSLPHAISSSKDLEGLPCLGDQTKAVIEDILEYGQCSKVQDVLCDDRYQTIKLFTSVFGVGLKTAEKWYRKGFHSLEEVQADKAIHFTKMQKAGFLYYDDISAAVCRAEADAIGQIVEETVRLIAPDAIVTLTGGFRRGKECGHDVDFLITTPEMGKEVWLLNRLINRLQNQGILLYYDIVESTFDKTRLPCRKFEAMDHFQKCFAIIKLKKERAAGRVQKDWKAIRVDFVMPPVDNFAFALLGWTGSRQFERDLRRFARHERKMLLDNHALYDKTKKIFLPAKTEEDIFAHLGLDYIPPWQRNA

SEQ ID NO: 20 - protein, 494 aa, Artificial Sequence
  Modified TdT Sequences
MLHIPIFPPIKKRQKLPESRNSCKYEVKFSEVAIFLVERKMGSSRRKFLTNLARSKGFRIEDVLSDAVTHVVAEQNSADELWQWLQNSSLGDLSKIEVLDISWFTECMEAGKPVQVEARHCLVKSCPVIDQYLEPSTVETVSQYACQRRTTMENHNQIFTDAFAILAENAEFNESEGPCLAFRRAASLLKSLPHAISSSKDLEGLPCLGDQTKAVIEDILEYGQCSKVQDVLCDDRYQTIKLFTSVFGVGLKTAEKWYRKGFHSLEEVQADKAIHFTKMQKAGFLYYDDISAAVCKAEADAIGQIVEETVRLIAPDAIVTLTGGFRRGKECGHDVDFLITTPEMGKEVWLLNRLINRLQNKGLLLYYDIVESTFDKTRLPCRKFEAMDHFQKCFAIIKLKKELAAGRVQKDWKAIRVDFVMPPVDNFAFALLGWTGSRQFERDLRRFARHERKMLLDNHALYDKTKKIFLPAKTEEDIFAHLGLDYIPPWQRNA

SEQ ID NO: 21 - protein, 494 aa, Artificial Sequence
  Modified TdT Sequences
MLHIPIFPPIKKRQKLPESRNSCKYEVKFSEVAIFLVERKMGSSRRKFLTNLARSKGFRIEDVLSDAVTHVVAEDNSADELWQWLQNSSLGDLSKIAVLDISWFTECMGAGKPVQVEARHCLVKSCPVIDQYLEPSTVETVSQYACQRRTTMENHNKIFTDAFAILAENAEFNESEGPCLAFRRAASLLKSLPHAISSSKDLEGLPCLGDQTKAVIEDILEYGQCSKVQDVLCDDRYQTIKLFTSVFGVGLKTAEKWYRKGFHSLEEVQADNAIHFTKMQKAGFLYYDDISAAVCKAEADAIGQIVEETVRLIAPDAIVTLTGGFRRGKECGHDVDFLITTPEMGKEVWLLNRLINRLQNQGILLYYDIVESTFDKTRLPCRKFEAMDHFQKCFAIIKLKKELAAGRVQKDWKAIRVDFVAAPVDNFAFALLGWTGSRQFERDLRRFARHERKMLLDNHALYDKTKKIFLPAKTEEDIFAHLGLDYIPPWQRNA

SEQ ID NO: 22 - protein, 494 aa, Artificial Sequence
  Modified TdT Sequences
MLHIPIFPPIKKRQKLPESRNSCKYEVKFSEVAIFLVERKMGSSRRAFLTNLARSKGFRIEDVLSDAVTHVVAEDNSADELWQWLQNSSLGDLSKIEVLDISWFTECMEAGKPVQVEARHCLVKSCPVIDQYLEPSTVETVSQYACQRRTTMENHNQIFTDAFAILAENAEFNESEGPCLAFRRAASLLKSLPHAISSSKDLEGLPCLGDQTKAVIQDILEYGQCSKVQDVLCDDRYQTIKLFTSVFGVGLKTAEKWYRKGFHSLEEVQADNTIHFTKMQKAGFLYYDDISAAVCKAEADAIGQIVEETVRLIAPDAIVTLTGGFRRGKECGHDVDFLITTPEMGKEVWLLNRLINRLQNQGILLYYDIVESTFDKTRLPCRKFEAMDHFQKCFAIIKLKKELAAGRVQKDWKAIRVDFVAPPVDNFAFALLGWTGSRQFERDLRRFARHERKMLLDNHALYDKTKKIFLPAKTEEDIFAHLGLDYIPPWQRNA

SEQ ID NO: 23 - protein, 494 aa, Artificial Sequence
  Modified TdT Sequences
MLHIPIFPPIKKRQKLPESRNSCKYEVKFSEVAIFLVERKMGSSRRKFLTNLARSKGFRIEDVLSDAITHVVAEDNSADELWQWLQNSSLGDLSKIEVLDISWFTECMEAGKPVQVEARHCLVKSCPVIDQYLEPSTVETVSQYACQRRTTMENHNQIFTDAFAILAENAEFNESEGPCLAFRRAASLLKSLPHAISSSKDLEGLPCLGDQTKAVIEDILEYGQCSKVQDVLCDDRYQTIKLFTSVFGVGLKTAEKWYRKGFHSLEEVQADKAIHFTKMQKAGFLYYDDISAAVCKAEADAIGQIVEETVRLIAPDAIVTLTGGFRRGKECGHDVDFLITTPEMGKEVWLLNRLINRLQNQGILLYYDIVESTFDKTRLPCRKFEAMDHFQKCFAIIKLKKERAAGRVQKNWKAIRVDFVMPPVDNFAFALLGWTGSRQFERDLRRFARHERKMLLDNHALYDKTKKIFLPAKTEEDIFAHLGLDYIPPWQRNA

SEQ ID NO: 24 - protein, 494 aa, Artificial Sequence
  Modified TdT Sequences
MLHIPIFPPIKKRQKLPESRNSCKYEVKFSEVAIFLVERKMGSSRRKFLTNLARSKGFRIEDVLSDAVTHVVAEQNSADELWQWLQNSSLGDLSKIEVLDISWFTECMRAGKPVQVEARHCLVKSCPVIDQYLEPSTVETVSQYACQRRTTMENHNQIFTDAFAILAENAEFNESEGPCLAFRRAASLLKSLPHAISSSKDLEGLPCLGDQTKAVIEDILEYGQCSKVQDVLCDDRYQTIKLFTSVFGVGLKTAEKWYRKGFHSLEEVQADKAIHFTKMQKAGFLYYDDISAAVCKAEADAIGQIVEETVRLIAPDAIVTLTGGFRRGKECGHDVDFLITTPEMGKEVWLLNRLINRLQNQGILLYYDIVESTFDKTRLPCRKFEAMDHFQKCFAIIKLKKELAAGRVQKDWKAIRVDFVMCPVDNFAFALLGWTGSRQFERDLRRFARHERKMLLDNHALYDKTKKIFLPAKTEEDIFAHLGLDYIPPWQRNA

SEQ ID NO: 25 - protein, 494 aa, Artificial Sequence
  Modified TdT Sequences
MLHIPIFPPIKKRQKLPESRNSCKYEVKFSEVAIFLVERKMGASRRKFLTNLARSKGFRIEDVLSDAVTHVVAEDNSADELWQWLQNSSLGDLSKIEVLDISWFTECMGAGKPVQVEARHCLVKSCPVIDQYLEPSTVETVSQYACQRRTTMENHNQIFTDAFAILAENAEFNESEGPCLAFRRAASLLKSLPHAISSSKDLEGLPCLGDQTKAVIEDILEYGQCSKVQDVLCDDRYQTIKLFTSVFGVGLKTAEKWYRKGFHSLEEVKADNAIHFTKMQKAGFLYYDDISAAVCKAEADAIGQIVEETVRLIAPDAIVTLTGGFRRGKECGHDVDFLITTPEMGKEVWLLNRLINRLQNQGILLYYDIVESTFDKTRLPCRKFEAMDHFQKCFAIIKLKKELAAGRVQKDWKAIRVDFVVPPVDNFAFALLGWTGSRQFERDLRRFARHERKMLLDNHALYDKTKKIFLPAKTEEDIFAHLGLDYIPPWQRNA

SEQ ID NO: 26 - protein, 494 aa, Artificial Sequence
  Modified TdT Sequences
MLHIPIFPPIKKRQKLPESRNSCKYEVKFSEVAIFLVERKMGSSRRKFLTNLARSKGFRIEDVLSDAVTHVVAEDNSADELWQWLQNSSLGDLSKIEVLDISWFTECMGAGKPVQSEARHCLVKSCPVIDQYLEPSTVETVSQYACQRRTTMEHHNQIFTDAFAILAENAEFNESEGPCLAFRRAASLLKSLPHAISSSKDLEGLPCLGDQTKRVIEDILEYGQCSKVQDVLCDDRYQTIKLFTSVFGVGLKTAEKWYRKGFHSLEEVQADNAIHFTKMQKAGFLYYDDISAAVCKAEADAIGQIVEETVRLIAPDAIVTLTGGFRRGKECGHDVDFLITTPEMGKEVWLLNRLINRLQNQGILLYYDIVESTFDKTRLPCRKFEAMDHFQKCFAIIKLKKELAAGRVQKDWKAIRVDFVAPPVDNFAFALLGWTGSRQFERDLRRFARHERKMLLDNHALYDKTKKIFLPAKTEEDIFAHLGLDYIPPWQRNA

SEQ ID NO: 27 - protein, 494 aa, Artificial Sequence
  Modified TdT Sequences
MLHIPIFPPIKKRQKLPESRNSCKYEVKFSEVAIFLVERKMGSSRRKFLTNLARSKGFRIEDVLSDAVTHVVAEDNSADELWQWLQNSSLGDLSKIEVLDISWFTECMEAGKPVQVEARHCLVKSCPVIDQYLEPSTVETVSQYACQRRTTMENHNQIFTDAFAILAENAEFNESEDPCLAFRRAASLLKSLPHAISSSKDLEGLPCLGDQTKAVIEDILEYGQCSKVQDVLCDDRYQTIKLFTSVFGVGLKTAEKWYRKGFHSLEEVQADKAIHFTKMQRAGFLYYDDISAAVCKAEADAIGQIVEETVRLIAPDAIVTLTGGFRRGKECGHDVDFLITTPEMGKEVWLLNRLINRLQNQGILLYYDIVESTFDKTRLPCRKFEAMDHFQKCFAIIKLKKELAAGRVQKDWKAIRVDFVACPVDNFAFALLGWTGSRQFERDLRRFARHERKMLLDNHALYDKTKKIFLPAKTEEDIFAHLGLDYIPPWQRNA

SEQ ID NO: 28 - protein, 494 aa, Artificial Sequence
  Modified TdT Sequences
MLHIPIFPPIKKRQKLPESRNSCKYEVKFSEVAIFLVERKMGSSRRKFLTNLARSKGFRIEDVLSDAVTHVVAEDNSADELWQWLQNSSLGDLSKIEVLDISWFTECMGAGKPVQVEARHCLVKSCPVIDQYLEPSTVETVSQYACQRRTTMENHNQIFTDAFAILAENAEFNESEGPCLAFRRAASLLKSLPHAISSSKDLEGLPCLGDQTKAVIQDILEYGQCSKVQDVLCDDRYQTIKLFTSVFGVGLKTAEKWYRKGFHSLEEVKADNAIHFTKMQKAGFLYYDDISAAVCKAEADAIGQIVEETVRLIAPDAIVTLTGGFRRGKECGHDVDFLITTPEMGKEVWLLNRLINRLQNQGILLYCDIVESTFDKTRLPCRKFEAMDHFQKCFAIIKLKKELAAGRVQKDWKAIRVDFVAPPVDNFAFALLGWTGSRQFERDLRRFARHERKMLLDNHALYDKTKKIFLPAKTEEDIFAHLGLDYIPPWQRNA

SEQ ID NO: 29 - protein, 494 aa, Artificial Sequence
  Modified TdT Sequences
MLHIPIFPPIKKRQKLPESRNSCKYEVKFSEVAIFLVERKMGSSRRKFLTNLGRSKGFRIEDVLSDAVTHVVAEDNSADELWQWLQNSSLGDLSKIEVLDISWFTECMGAGKPVQVEARHCLVKSCPVIDQYLEPSTVETVSQYACQRRTTMENHNKIFTDAFAILAENAEFNESEGPCLAFRRAASLLKSLPHAISSSKDLEGLPCLGDQTKAVIQDILEYGQCSKVQDVLCDDRYQTIKLFTSVFGVGLKTAEKWYRKGFHSLEEVQADNAIHFTKMQKAGFLYYDDISAAVCKAEADAIGQIVEETVRLIAPDAIVTLTGGFRRGKECGHDVDFLITTPEMGKEVWLLNRLINRLQNQGILLYYDIVESTFDKTRLPCRKFEAMDHFQKCFAIIKLKKELAAGRVQKDWKAIRVDFVMPPVDNFAFALLGWTGSRQFERDLRRFARHERKMLLDNHALYDKTKKIFLPAKTEEDIFAHLGLDYIPPWQRNA

SEQ ID NO: 30 - protein, 494 aa, Artificial Sequence
  Modified TdT Sequences
MLHIPIFPPIKKRQKLPESRNSCKYEVKFSEVAIFLVERKMGSSRRKFLTNLARSKGFRIEDVLSDAVTHVVAEQNSADELWQWLQNSSLGDLSKIEVLDISWFTECMEAGKPVQVEARHCLVKSCPVIDQYLEPSTVETVSQYACQRRTTMENHNQIFTDAFAILAENAEFNESEGPCLAFRRAASLLKSLPHAISSSKDLEGLPCLGDQTKAVIEDILEYGQCSKVQDVLCDDRYQTIKLFTSVFGVGLKTAEKWYRKGFHSLEEVQADKAIHFTKMQKAGFLYYDDISAAVCKAEADAIGQIVEETVRLIAPDAIVTLTGGFRRGKECGHDVDFLITTPEMGKEVWLLNRLINRLQNQGILLYYDIVESTFDKTRLPCRKFEAMDHFQKCFAIIKLKKELAAGRVQKDWKAIRVDFVACPVDRFAFALLGWTGSRQFERDLRRFARHERKMLLDNHALYDKTKKIFLPAKTEEDIFAHLGLDYIPPWQRNA

SEQ ID NO: 31 - protein, 494 aa, Artificial Sequence
  Modified TdT Sequences
MLHIPIFPPIKKRQKLPESRNSCKYEVKFSEVAIFLVERKMGSSRRKFLTNLARSKGFRIEDVLSDAVTHVVAEDNSADELWQWLQNSSLGDLSKIEVLDISWFTECMEAGKPVQVEARHCLVKSCPVIDQYLEPSTVETVSQYACQRRTTMENHNQIFTDAFAILAENAEFNESEGPCLAFRRAASLLKSLPHAISSSKDLEGLPCLGDQTKAVIEDILEYGQCSKVQDVLCDDRYQTIKLFTSVFGVGLKTAEKWYRKGFHSLEEVQADKAIHFTKMQKAGFLYYDDISAAVCKAEADAIGQIVEETVRLIAPDAIVTLTGGFRRGKECGHDVDFLITTPEMGKEVWLLNRLINRLQNQGILLYYDIVESTFDKTRLPCRKFEAMDHFQKCFAIIKLKKELAAGRVQKNWKAIRVDFVLCPVDNFAFALLGWTGSRQFERDLRRFARHERKMLLDNHALYDKTKKIFLPAKTEEDIFAHLGLDYIPPWQRNA

SEQ ID NO: 32 - protein, 494 aa, Artificial Sequence
  Modified TdT Sequences
MLHIPIFPPIKKRQKLPESRNSCKYEVKFSEVAIFLVERKMGSSRRAFLTNLARSKGFRIEDVLSDAVTHVVAEDNSADELWQWLQNSSLGDLSKIEVLDISWFTECMGAGKPVQVEARHCLVKSCPVIDQYLEPSTVETVSQYACQRRTTMENHNQIFTDAFAVLAENAEFNESEGPCLAFRRAASLLKSLPHPISSSKDLEGLPCLGDQTKAVIEDILEYGQCSKVQDVLCDDRYQTIKLFTSVFGVGLKTAEKWYRKGFHSLEEVQADNAIHFTKMQKAGFLYYDDISAAVCKAEADAIGQIVEETVRLIAPDAIVTLTGGFRRGKECGHDVDFLITTPEMGKEVWLLNRLINRLQNQGILLYYDIVESTFDKTRLPCRKFEAMDHFQKCFAIIKLKKELAAGRVQKDWKAIRVDFVAAPVDNFAFALLGWTGSRQFERDLRRFARHERKMLLDNHALYDKTKKIFLPAKTEEDIFAHLGLDYIPPWQRNA

SEQ ID NO: 33 - protein, 494 aa, Artificial Sequence
  Modified TdT Sequences
MLHIPIFPPIKKRQKLPESRNSCKYEVKFSEVAIFLVERKMGASRRKFLTNLARSKGFRIEDVLSDAVTHVVAEDNSADELWQWLQNSSLGDLSKIEVLDISWFTECMGAGKPVQVEARHCLVKSCPVIDQYLEPSTVETVSQYACQRRTTMENHNQIFTDAFAILAENAEFNESEGPCLAFRRAASLLKSLPHAISSSKDLEGLPCLGDQTKAVIEDILEYGQCSKVQDVLCDDRYQTIKLFTSVFGVGLKTAEKWYRKGFHSLEEVQADNAIHFTKMQKAGFLYYDDINAAVCKAEADAIGQIVEETVRLIAPDAIVTLTGGFRRGKECGHDVDFLITTPQMGKEVWLLNRLINRLQNQGILLYYDIVESTFDKTRLPCRKFEAMDHFQKCFAIIKLKKELAAGRVQKDWKAIRVDFVAPPVDNFAFALLGWTGSRQFERDLRRFARHERKMLLDNHALYDKTKKIFLPAKTEEDIFAHLGLDYIPPWQRNA

SEQ ID NO: 34 - protein, 494 aa, Artificial Sequence
  Modified TdT Sequences
MLHIPIFPPIKKRQKLPESRNSCKYEVKFSEVAIFLVERKMGSSRRKFLTNLARSKGFRIEDVLSDAVTHVVAEDNSADELWQWLQNSSLGDLSKIEVLDISWFTECMGAGKPVQVEARHCLVKSCPVIDQYLEPSTVETVSQYACQRRTTMENHNQIFTDAFAILAENAEFNESEGPCLAFRRAASLLKSLPHAISSSKDLEGLPCLGDQTKAVIEDILEYGQCSKVQDVLCDDRYQTIKLFTSVFGVGLKTAEKWYRKGFHTLEEVQADNAIHFTKMQKAGFLYYDDISAAVCKAEADAIGQIVEEAVRLIAPDAIVTLTGGFRRGKECGHDVDFLITSPEMGKEVWLLNRLINRLQNQGILLYYDIVESTFDKTRLPCRKFEAMDHFQKCFAIIKLKKELAAGRVQKDWKAIRVDFVAPPVDNFAFALLGWTGSRQFERDLRRFARHERKMLLDNHALYDKTKKIFLPAKTEEDIFAHLGLDYIPPWQRNA

SEQ ID NO: 35 - protein, 494 aa, Artificial Sequence
  Modified TdT Sequences
MLHIPIFPPIKKRQKLPESRNSCKYEVKFSEVVIFLVERKMGSSRRKFLTNLARSKGFRIEDVLSDAVTHVVAEDNSADELWQWLQNSSLGDLSKIEVLDISWFTECMEAGKPVQVEARHCLVKSCPVIDQYLEPSTVETVSQYACQRRTTMENHNQIFTDAFAILAENAEFNESEDPCLAFRRAASLLKSLPHAISSSRDLEGLPCLGDQTKAVIEDILEYGQCSKVQDVLCDDRYQTIKLFTSVFGVGLKTAEKWYRKGFHSLEEVQADKAIHFTKMQKAGFLYYDDISAAVCKAEADAIGQIVEETVRLIAPDAIVTLTGGFRRGKECGHDVDFLITTPEMGKEVWLLNRLINRLQNQGILLYYDIVESTFDKTRLPCRKFEAMDHFQKCFAIIKLKKELAAGRVQKDWKAIRVDFVMPPVDNFAFALLGWTGSRQFERDLRRFARHERKMLLDNHALYDKTKKIFLPAKTEEDIFAHLGLDYIPPWQRNA

SEQ ID NO: 36 - protein, 494 aa, Artificial Sequence
  Modified TdT Sequences
MLHIPIFPPIKKRQKLPESRNSCKYEVKFSEVAIFLVERKMGSSRRKFLTNLARSKGFRIEDVLSDAVTHVVAENNSADELWQWLQNSSLGDLSKIEVLDISWFTECMGAGKPVQVEARHCLVKSCPVIDQYLEPSTVETVSQYACQRRTTMEHHNQIFTDAFAILAENAEFNESEGPCLAFRRAASLLKSLPHAISSSKDLEGLPCLGDQTKAVIEDILEYGQCSKVQDVLCDDRYQTIKLFTSVFGVGLKTAEKWYRKGFHSLEEVQADNAIHFTKMQKAGFLYYDDISAAVCKAEADAIGQIVEETVRLIAPDAIVTLTGGFRRGKECGHDVDFLITTPQMGKEVWLLNRLINRLQNQGILLYYDIVESTFDKTRLPCRKFEAMDHFQKCFAIIKLKKELAAGRVQKDWKAIRVDFVAPPVDNFAFALLGWTGSRQFERDLRRFARHERKMLLDNHALYDKTKKIFLPAKTEEDIFAHLGLDYIPPWQRNA

SEQ ID NO: 37 - protein, 494 aa, Artificial Sequence
  Modified TdT Sequences
MLHIPIFPPIKKRQKLPESRNSCKYEVKFSEVAIFLVERKMGSSRRKFLTNLARSKGFRIEDVLSDAVTHVVAEDNSADELWQWLQNSSLRDLSKIEVLDISWFTECMEAGKPVQVEARHCLVKSCPVIDQYLEPSTVETVSQYACQRRTTMENHNQIFTDAFAILAENAEFNESEGPCLAFRRAASLLKSLPHAISSSKDLEGLPCLGDQTKAVIEDILEYGQCSKVQDVLCDDRYQTIKLFTSVFGVGLKTAEKWYRKGFHSLEEVQADKAIHFTKMQKAGFLYYDDISAAVCKAEADAIGQIVEETVRLIAPDAIVTLTGGFRRGKECGHDVDFLITTPEMRKEVWLLNRLINRLQNQGILLYYDIVESTFDKTRLPCRKFEAMDHFQKCFAIIKLKKELAAGRVQKDWKAIRVDFVAAPVDNFAFALLGWTGSRQFERDLRRFARHERKMLLDNHALYDKTKKIFLPAKTEEDIFAHLGLDYIPPWQRNA

SEQ ID NO: 38 - protein, 494 aa, Artificial Sequence
  Modified TdT Sequences
MLHIPIFPPIKKRQKLPESRNSCKYEVKFSEVAIFLVERKMGSSRRKFLTNLARSKGFRIEDVLSDAVTHVVAEDNSADELWQWLQNSSLGDLSKIEVLDISWFTECMEAGKPVQVEARHCLVKSCPVIDQYLEPSTVETVSQYACQRRTTMENHNQIFTDAFAILAENAEFNESEGPCVAFRRAASLLKSLPHAISSSKDLEGLPCLGDQSKAVIEDILEYGQCSKVQDVLCDDRYQTIKLFTSVFGVGLKTAEKWYRKGFHSLEEVQADKAIHFTKMQKAGFLYYDDISAAVCKAEADAIGQIVEETVRLIAPDAIVTLTGGFRRGKECGHDVDFLITTPEMGKEVWLLNRLINRLQNQGILLYYDIVESTFDKTRLPCRKFEAMDHFQKCFAIIKLKKELAARRVQKDWKAIRVDFVMPPVDNFAFALLGWTGSRQFERDLRRFARHERKMLLDNHALYDKTKKIFLPAKTEEDIFAHLGLDYIPPWQRNA

SEQ ID NO: 39 - protein, 494 aa, Artificial Sequence
  Modified TdT Sequences
MLHIPIFPPIKKRQKLPESRNSCKYEVKFSEVAIFLVERKMGSSRRKFLTNLARSKGFRIEDVLSDAVTHVVAEQNSADELWQWLQNSSLGDLSKIEVLDISWFTECMEAGKPVQVEARHCLVKSCPVIDQYLEPSTVETVSQYACQRRTTMENHNQIFTDAFAILAENAEFNESEGPCLAFRRAASLLKSLPHAISSSKDLEGLPCLGDQTKAVIEDILEYGQCSKVQDVLCDDRYQTIKLFTSVFGVGLKTAEKWYRKGFHSLEEVQADKAIHFTKMQKAGFLYYDDISAAVCKAEADAIGQIVEETVRLIAPDAIVTLTGGFRRGKECGHDVDFLITTPEMGKEVWLLNRLINRLQNQGILLYYDIVESTFDKTRLPCRKFEAMDHFQKCFAIIKLKKELAAGRVQKDWKAIRVDFVLAPVDNFAFALLGWTGSRQFERDLRRFARHERKMLLDNHALYDKTKKIFLPAKTEEDIFAHLGLDYIPPWQRNA

SEQ ID NO: 40 - protein, 494 aa, Artificial Sequence
  Modified TdT Sequences
MLHIPIFPPIKKRQKLPESRNSCKYEVKFSEIAIFLVERKMGSSRRKFLTNLARSKGFRIEDVLSDAVTHVVAEDNSADELWQWLQNSSLGDLSKIEVLDISWFTECMEAGKPVQVEARHCLVKSCPVIDQYLEPSAVETVSQYACQRRTTMENHNQIFTDAFAILAENAEFNESEGPCLEFRRAASLLKSLPHAISSSKDLEGLPCLGDQTKAVIEDILEYGQCSKVQDVLCDDRYQTIKLFTSVFGVGLKTAEKWYRKGFHSLEEVQADKAIHFTKMQKAGFLYYDDISAAVCKAEADAIGQIVEETVRLIAPDAIVTLTGGFRRGKECGHDVDFLITTPEMGKEVWLLNRLINRLQNQGILLYYDIVESTFDKTRLPCRKFEAMDHFQKCFAIIKLKKELAAGRVQKDWKAIRVDFVMPPVDNFAFALLGWTGSRQFERDLRRFARHERKMLLDNHALYDKTKKIFLPAKTEEDIFAHLGLDYIPPWQRNA

SEQ ID NO: 41 - protein, 494 aa, Artificial Sequence
  Modified TdT Sequences
MLHIPIFPPIKKRQKLPESRNSCKYEVKFSEVAIFLVERKMGSSRRKFLTNLARSKGFRIEDVLSDAVTHVVAEDNSADELWQWLQNSSLGDLSKIEVLDISWFTECMRAGKPVQVEARHCLVKSCPVIDQYLEPSTVETVSQYACQRRTTMENHNQIFTDAFAILAENAEFNESEGPCLAFRRAASLLKSLPHAISSSKDLEGLPCLGDQTKAVIEDILEYGQCSKVQDVLCDDRYQTIKLFTSVFGVGLKTAEKWYRKGFHSLEEVQADKAIHFTKMQKAGFLYYDDISAAVCKAEADAIGQIVEETVRLIAPDAIVTLTGGFRRGKECGHDVDFLITTPEMGKEVWLLQRLINRLQNKGILLYYDIVESTFDKTRLPCRKFEAMDHFQKCFAIIKLKKELAAGRVQKDWKAIRVDFVMPPVDNFAFALLGWTGSRQFERDLRRFARHERKMLLDNHALYDKTKKIFLPAKTEEDIFAHLGLDYIPPWQRNA

SEQ ID NO: 42 - protein, 494 aa, Artificial Sequence
  Modified TdT Sequences
MLHIPIFPPIKKRQKLPESRNSCKYEVKFSEVAIFLVERKMGSSRRKFLTNLARSKGFRIEDVLSDAVTHIVAEDNSADELWQWLQNSSLGDLSKIEVLDISWFTECMGAGKPVQVEARHCLVKSCPVIDQYLEPSTVETVSQYACQRRTTMENHNQIFTDAFAILAENAEFNESEGPCLAFRRAASLLKSLPHAISSSKDLEGLPCLGDQTKRVIEDILEYGQCSKVQDVLCDDRYQTIKLFTSVFGVGLKTAEKWYRKGFHSLEEVQADNAIHFTKMQRAGFLYYDDISAAVCKAEADAIGQIVEETVRLIAPDAIVTLTGGFRRGKECGHDVDFLITTPEMGKEVWLLNRLINRLQNQGILLYYDIVESTFDKTRLPCRKFEAMDHFQKCFAIIKLKKELAAGRVQKDWKAIRVDFVAPPVDNFAFALLGWTGSRQFERDLRRFARHERKMLLDNHALYDKTKKIFLPAKTEEDIFAHLGLDYIPPWQRNA

SEQ ID NO: 43 - protein, 494 aa, Artificial Sequence
  Modified TdT Sequences
MLHIPIFPPIKKRQKLPESRNSCKYEVKFSEVAIFLVERKMGSSRRKFLTNLARSKGFRIEDVLSDAVTHVVAEDNSADELWQWLQNSSLGDLSKIEVLDISWFTECMEAGKPVQVEARHCLVKSCPVIDQYLEPSTVETVSQYACQRRTTMENHNQMFTDAFAILAENAEFNESEGPCLAFRRAASLLKSLPHAISSSKDLEGLPCLGDQTKAVIEDILEYGQCSKVQDVLCDDRYQTIKLFTSVFGVGLKTAEKWYRKGFHSLEEVQADKAIHFTKMQKAGFLYYDDISAAVCKAEAQAIGQIVEETVRLIAPDAIVTLTGGFRRGKECGHDVDFLITTPEMGKEVWLLNRLINRLQNQGILLYYDIVESTFDKTRLPCRKFEAMDHFQKCFAIIKLKKELAAGRVQKDWKAIRVDFVMCPVDNFAFALLGWTGSRQFERDLRRFARHERKMLLDNHALYDKTKKIFLPAKTEEDIFAHLGLDYIPPWQRNA

SEQ ID NO: 44 - protein, 494 aa, Artificial Sequence
  Modified TdT Sequences
MLHIPIFPPIKKRQKLPESRNSCKYEVKFSEVAIFLVERKMGASRRKFLTNLARSKGFRIEDVLSDAVTHVVAEDNSADELWQWLQNSSLGDLSKIEVLDISWFTECMGAGKPVQVEARHCLVKSCPVIDQYLEPSTVETVSQYACQRRTTMENHNQIFTDAFAILAENAEFNESEGPCLAFRRAASLLKSLPHAISSSKDLEGLPCLGDQTKAVIEDILEYGQCSKVQDVLCDDRYQTIKLFTSVFGVGLKTAEKWYRKGLHSLEEVQADNAIHFTKMQKAGFLYYDDISAAVCKAEADAIGQIVEETVRLIAPDAIVTLTGGFRRGKECGHDVDFLITTPEMGKEVWLLNRLINRLQNQGILLYYDIVESTFDKTRLPCRKFEAMDHFQKCFAIIKLKKELAAGRVQKDWKAIRVDFVAPPVDNFAFALLGWTGSRQFERDLRRFARHEKKMLLDNHALYDKTKKIFLPAKTEEDIFAHLGLDYIPPWQRNA

SEQ ID NO: 45 - protein, 494 aa, Artificial Sequence
  Modified TdT Sequences
MLHIPIFPPIKKRQKLPESRNSCKYEVKFSEVAIFLVERKMGSSRRKFLTNLARSKGFRIENVLSDAVTHVVAEQNSADELWQWLQNSSLGDLSKIEVLDISWFTECMEAGKPVQVEARHCLVKSCPVIDQYLEPSTVETVSQYACQRRTTMENHNQIFTDAFAILAENAEFNESEGPCLAFRRAASLLKSLPHAISSSKDLEGLPCLGDQSKAVIEDILEYGQCSKVQDVLCDDRYQTIKLFTSVFGVGLKTAEKWYRKGFHSLEEVQADKAIHFTKMQKAGFLYYDDISAAVCKAEADAIGQIVEETVRLIAPDAIVTLTGGFRRGKECGHDVDFLITTPEMGKEVWLLNRLINRLQNQGILLYYDIVESTFDKTRLPCRKFEAMDHFQKCFAIIKLKKELAAGRVQKDWKAIRVDFVMPPVDNFAFALLGWTGSRQFERDLRRFARHERKMLLDNHALYDKTKKIFLPAKTEEDIFAHLGLDYIPPWQRNA

SEQ ID NO: 46 - protein, 494 aa, Artificial Sequence
  Modified TdT Sequences
MLHIPIFPPIKKRQKLPESRNSCKYEVKFSEVAIFLVERKMGSSRRKFLTNLARSKGFRIEDVLSDAVTHVVAEDNSADELWQWLQNSSLGDLSKIEVLDISWFTECMGAGKPVQVEARHCLVKSCPVIDQYLEPSTVETVSQYACQRRTTMENHNQIFTDAFAILAENAEFNESEGPCLAFRRAASLLKSLPHPISSSKDLEGLPCLGDQTKAVIEDILEYGQCSKVQDVLCDDRYQTIKLFTSVFGVGLKTAEKWYRKGFHSLEEVQADNAIHFTKMQKAGFLYYDDISAAVCKAEAQAIGQIVEETVRLIAPDAIVTLTGGFRRGKECGHDVDFLITTPEMGKEVWLLNRLINRLQNQGILLYCDIVESTFDKTRLPCRKFEAMDHFQKCFAIIKLKKELAAGRVQKDWKAIRVDFVAPPVDNFAFALLGWTGSRQFERDLRRFARHERKMLLDNHALYDKTKKIFLPAKTEEDIFAHLGLDYIPPWQRNA

SEQ ID NO: 47 - protein, 494 aa, Artificial Sequence
  Modified TdT Sequences
MLHIPIFPPIKKRQKLPESRNSCKYEVKFSEVAIFLVERKMGSSRRKFLTNLARSKGFRIEDVLSDAVTHVVAEDNSADELWQWLQNSSLGDLSKIEVLDISWFTECMEAGKPVQVEARHCLVKSCPVIDQYLEPSTVETVSQYACQRRTTMENHNQIFTDAFAILAENAEFNESEGPCLAFRRAASLLKSLPHAISSSKDLEGLPCLGDQTKAVIEDILEYGQCSKVQDVLCDDRYQTIKLFTSVFGVGLKTAEKWYRKGFHSLEEVQADKAIHFTKMQKAGFLYYDDISAAVCKAEADAIGQIVEETVRLIAPDAIVTLTGGFRRGKECGHDVDFLITTPEMGKEVWLLNRLINRLQNQGILLYYDIVESTFDKTRLPCRKFEAMDHFQKCFAIIKLKKELAAGRVQKDWKAIRVDFVMPPVDNFAFALLGWTGSRQFERDLRRFARHERKMLLDNHALYDKTKKIFLPAKTEEDIFAHLGLDYIPPWQRNA

SEQ ID NO: 48 - protein, 494 aa, Artificial Sequence
  Modified TdT Sequences
MLHIPIFPPIKKRQKLPESRNSCKYEVKFSEVAIFLVERKMGSSRRKFLTNLARSKGFRIEDVLSDAVTHVVAEDNSADELWQWLQNSSLGDLSKIEVLDISWFTECMRAGKPVQVEARHCLVKSCPVIDQYLEPSTVETVSQYACQRRTTMENHNQIFTDAFAILAENAEFNESEGPCLAFRRAASLLKSLPHAISSSKDLEGLPCLGDQTKAVIEDILEYGQCSKVQDVLCDDRYQTIKLFTSVFGVGLKTAEKWYRKGFHSLEEVQADKAIHFTKMQKAGFLYYDDISAAVCKAEADAIGQIVEETVRLIAPDAIVTLTGGFRRGKECGHDVDFLITTPEMGKEVWLLNRLINRLQNQGILLYYDIVESTFDKTRLPCRKFEAMDHFQKCFAIIKLKKELAAGRVQKDWKAIRVDFVLPPVDRFAFALLGWTGSRQFERDLRRFARHERKMLLDNHALYDKTKKIFLPAKTEEDIFAHLGLDYIPPWQRNA

SEQ ID NO: 49 - protein, 494 aa, Artificial Sequence
  Modified TdT Sequences
MLHIPIFPPIKKRQKLPESRNSCKYEVKFSEVAIFLVERKMGSSRRKFLTNLARSKGFRIEDVLSDAVTHVVAEDNSADELWQWLQNSSLGDLSKIEVLDVSWFTECMEAGKPVQVEARHCLVKSCPVIDQYLEPSTVETVSQYACQRRTTMENHNQIFTDAFAILAENAEFNESEGPCLAFRRAASLLKSLPHAISSSKDLEGLPCLGDQTKAVIEDILEYGQCSKVQDVLCDDRYQTIKLFTSVFGVGLKTAEKWYRKGFHSLEEVQADNAIHFTKMQKAGFLYYDDISAAVCKAEADAIGQIVEETVRLIAPDAIVTLTGGFRRGKECGHDVDFLITTPEMGKEVWLLNRLINRLQNQGILLYYDIVESTFDKTRLPCRKFEAMDHFQKCFAIIKLKKELAAGRVQKDWKAIRVDFVMCPVDNFAFALLGWTGSRQFERDLRRFARHERKMLLDNHALYDKTKKIFLPAKTEEDIFAHLGLDYIPPWQRNA

SEQ ID NO: 50 - protein, 494 aa, Artificial Sequence
  Modified TdT Sequences
MLHIPIFPPIKKRQKLPESRNSCKYEVKFSEVAIFLVERKMGSSRRKFLTNLARSKGFRIEDVLSDAVTHVVAEQNSADELWQWLQNSSLGDLSKIEVLDISWFTECMGAGKPVQVEARHCLVKSCPVIDQYLEPSTVETVSQYACQRRTTMENHNQIFTDAFAILAENAEFNESEGPCLAFRRAASLLKSLPHAISSSKDLEGLPCLGDQTKAVIEDILEYGQCSKVQDVLCDDRYQSIKLFTSVFGVGLKTAEKWYRKGFHSLEEVQADNAIHFTKMQKAGFLYYDDISAAVCKAEAQAIGQIVEETVRLIAPDAIVTLTGGFRRGKECGHDVDFLITTPEMGKEVWLLNRLINRLQNQGILLYYDIVESTFDKTRLPCRKFEAMDHFQKCFAIIKLKKELAAGRVQKDWKAIRVDFVAPPVDNFAFALLGWTGSRQFERDLRRFARHERKMLLDNHALYDKTKKIFLPAKTEEDIFAHLGLDYIPPWQRNA

SEQ ID NO: 51 - protein, 494 aa, Artificial Sequence
  Modified TdT Sequences
MLHIPIFPPIKKRQKLPESRNSCKYEVKFSEVAIFLVERKMGASRRKFLTNLGRSKGFRIEDVLSDAVTHVVAEDNSADELWQWLQNSSLGDLSKIEVLDISWFTECMEAGKPVQVEARHCLVKSCPVIDQYLEPSTVETVSQYACQRRTTMENHNQIFTDAFAILAENAEFNESEGPCLAFRRAASLLKSLPHAISSSKDLEGLPCLGDQTKAVIEDILEYGQCSKVQDVLCDDRYQTIKLFTSVFGVGLKTAEKWYRKGFHSLEEVQADNAIHFTKMQKAGFLYYDDISAAVCKAEADAIGQIVEETVRLIAPDAIVTLTGGFRRGKECGHDVDFLITSPEMGKEVWLLNRLINRLQNQGILLYYDIVESTFDKTRLPCRKFEAMDHFQKCFAIIKLKKELAAGRVQKDWKAIRVDFVAPPVDNFAFALLGWTGSRQFERDLRRFARHERKMLLDNHALYDKTKKIFLPAKTEEDIFAHLGLDYIPPWQRNA

SEQ ID NO: 52 - protein, 494 aa, Artificial Sequence
  Modified TdT Sequences
MLHIPIFPPIKKRQKLPESRNSCKYEVKFSEVAIFLVERKMGSSRRKFLTNLARSKGFRIEDVLSDAVTHVVAEDNSADELWQWLQNSSLRDLSKIEVLDISWFTECMEAGKPVQVEARHCLVKSCPVIDQYLEPSTVETVSQYACQRRTTMENHNQIFTDAFAILAENAEFNESEGPCLAFRRAASLLKSLPHAISSSKDLEGLPCLGDQSKAVIEDILEYGQCSKVQDVLCDDRYQTIKLFTSVFGVGLKTAEKWYRKGFHSLEEVQADKAIHFTKMQKAGFLYYDDISAAVCKAEADAIGQIVEETVRLIAPDAIVTLTGGFRRGKECGHDVDFLITTPEMGKEVWLLNRLINRLQNQGILLYYDIVESTFDKTRLPCRKFEAMDHFQKCFAIIKLKKELAAGRVQKDWKAIRVDFVMCPVDNFAFALLGWTGSRQFERDLRRFARHERKMLLDNHALYDKTKKIFLPAKTEEDIFAHLGLDYIPPWQRNA

SEQ ID NO: 53 - protein, 494 aa, Artificial Sequence
  Modified TdT Sequences
MLHIPIFPPIKKRQKLPESRNSCKYEVKFSEVAIFLVERKMGSSRRKFLTNLARSKGFRIEDVLSDAVTHVVAEDNSADELWQWLQNSSLGDLSKIEVLDISWFTECMGAGKPVQVEARHCLVKSCPVIDQYLEPSTVETVSQYACQRRTTMENHNQIFTDAFAILAENAEFNESEGPCLAFRRAASLLKSLPHPISSSKDLEGLPCLGDQSKAVIEDILEYGQCSKVQDVLCDDRYQTIKLFTSVFGVGLKTAEKWYRKGLHSLEEVQADNAIHFTKMQKAGFLYYDDISAAVCKAEADAIGQIVEETVRLIAPDAIVTLTGGFRRGKECGHDVDFLITTPEMGKEVWLLNRLINRLQNQGILLYYDIVESTFDKTRLPCRKFEAMDHFQKCFAIIKLKKELAAGRVQKDWKAIRVDFVAPPVDNFAFALLGWTGSRQFERDLRRFARHERKMLLDNHALYDKTKKIFLPAKTEEDIFAHLGLDYIPPWQRNA

SEQ ID NO: 54 - protein, 494 aa, Artificial Sequence
  Modified TdT Sequences
MLHIPIFPPIKKRQKLPESRNSCKYEVKFSEVAIFLVERKMGSSRRKFLTNLARSKGFRIEDVLSDAVTHVVAEDNSADELWQWLQNSSLGDLSKIEVLDISWFTECMGAGKPVQVEARHCLVKSCPVIDQYLEPSTVETVSQYACQRRTTMENHNQIFTDAFAILAENAEFNESEGPCLAFMRAASLLKSLPHAISSSKDLEGLPCLGDQTKAVIEDILEYGQCSKVQDVLCDDRYQTIKLFTSVFGVGLKTAEKWYRKGFHSLEEVQADNAIHFTKMQKAGFLYYDDISAAVCKAEAQAIGQIVEETVRLIAPDAIVTLTGGFRRGKECGHDVDFLITTPEMGKEVWLLNRLINRLQNQGILLYYDIVESTFDKTRLPCRKFEAMDHFQKCFAIIKLKKELAAGRVQKDWKAIRVDFVAPPVDNFAFALLGWTGSRQFERDLRRFARHEKKMLLDNHALYDKTKKIFLPAKTEEDIFAHLGLDYIPPWQRNA

SEQ ID NO: 55 - protein, 494 aa, Artificial Sequence
  Modified TdT Sequences
MLHIPIFPPIKKRQKLPESRNSCKYEVKFSEVAIFLVERKMGSSRRKFLTNLARSKGFRIEDVLSDAVTHVVAEDNSADELWQWLQNSSLGDLSKIEVLDVSWFTECMEAGKPVQVEARHCLVKSCPVIDQYLEPSTVETVSQYACQRRTTMENHNRIFTDAFAILAENAEFNESEGPCLAFRRAASLLKSLPHAISSSKDLEGLPCLGDQTKAVIEDILEYGQCSKVQDVLCDDRYQTIKLFTSVFGVGLKTAEKWYRKGFHSLEEVQADKAIHFTKMQKAGFLYYDDISAAVCKAEADAIGQIVEETVRLIAPDAIVTLTGGFRRGKECGHDVDFLITTPEMGKEVWLLNRLINRLQNQGILLYYDIVESTFDKTRLPCRKFEAMDHFQKCFAIIKLKKELAAGRVQKDWKAIRVDFVMAPVDNFAFALLGWTGSRQFERDLRRFARHERKMLLDNHALYDKTKKIFLPAKTEEDIFAHLGLDYIPPWQRNA

SEQ ID NO: 56 - protein, 494 aa, Artificial Sequence
  Modified TdT Sequences
MLHIPIFPPIKKRQKLPESRNSCKYEVKFSEVAIFLVERKMGSSRRKFLTNLARSKGFRIEDVLSDAVTHVVAEDNSADELWQWLQNSSLGDLSKIEVLDISWFTECMEAGKPVQVEARHCLVKSCPVIDQYLEPSTVETVSQYACQRRTTMENHNQIFTDAFAILAENAEFNESEGPCLEFRRAASLLKSLPHAISSSKDLEGLPCLGDQTKAVIEDILEYGQCSKVQDVLCDDRYQTIKLFTSVFGVGLKTAEKWYRKGFHSLEEVQADNAIHFTKMQKAGFLYYDDISAAVCKAEADAIGQIVEETVRLIAPDAIVTLTGGFRRGKECGHDVDFLITTPEMGKEVWLLNRLINRLQNQGILLYYDIVESTFDKTRLPCRKFEAMDHFQKCFAIIKLKKELAAGRVQKDWKAIRVDFVAAPVDNFAFALLGWTGSRQFERDLRRFARHERKMLLDNHALYDKTKKIFLPAKTEEDIFAHLGLDYIPPWQRNA

SEQ ID NO: 57 - protein, 494 aa, Artificial Sequence
  Modified TdT Sequences
MLHIPIFPPIKKRQKLPESRNSCKYEVKFSEVAIFLVERKMGSSRRKFLTNLARSKGFRIEDVLSDAVTHVVAEDNSADELWQWLQNSSLGDLSKIEVLDISWFTECMEAGKPVQVEARHCLVKSCPVIDQYLEPSTVETVSQYACQRRTTMENHNQIFTDAFAILAENAEFNESEGPCLAFRRAASLLKSLPHAISSSKDLEGLPCLGDQSKAVIEDILEYGQCSKVQDVLCDDRYQTIKLFTSVFGVGLKTAEKWYRKGFHSLEEVQADNAIHFTKMQKAGFLYYDDISAAVCKAEADAIGQIVEETVRLIAPDAIVTLTGGFRRGKECGHDVDFLITTPEMGKEVWLLNRLINRLQNKGILLYYDIVESTFDKTRLPCRKFEAMDHFQKCFAIIKLKKELAAGRVQKDWKAIRVDFVMPPVDNFAFALLGWTGSRQFERDLRRFARHERKMLLDNHALYDKTKKIFLPAKTEEDIFAHLGLDYIPPWQRNA

SEQ ID NO: 58 - protein, 494 aa, Artificial Sequence
  Modified TdT Sequences
MLHIPIFPPIKKRQKLPESRNSCKYEVKFSEVAIFLVERKMGSSRRKFLTNLARSKGFRIEDVLSDAVTHVVAEDNSADELWQWLQNSSLGDLSKIAVLDISWFTECMGAGKPVQVEARHCLVKSCPVIDQYLEPSTVETVSQYACQRRTTMENHNQIFTDAFAILAENAEFNESEGPCLAFRRAASLLKSLPHAISSSKDLEGLPCLGDQTSAVIEDILEYGQCSKVQDVLCDDRYQTIKLFTSVFGVGLKTAEKWYRKGFHTLEEVQADNAIHFTKMQKAGFLYYDDISAAVCKAEADAIGQIVEETVRLIAPDAIVTLTGGFRRGKECGHDVDFLITTPEMGKEVWLLNRLINRLQNQGILLYYDIVESTFDKTRLPCRKFEAMDHFQKCFAIIKLKKELAAGRVQKDWKAIRVDFVAPPVDNFAFALLGWTGSRQFERDLRRFARHERKMLLDNHALYDKTKKIFLPAKTEEDIFAHLGLDYIPPWQRNA

SEQ ID NO: 59 - protein, 494 aa, Artificial Sequence
  Modified TdT Sequences
MLHIPIFPPIKKRQKLPESRNSCKYEVKFSEVAIFLVERKMGSSRRAFLTNLARSKGFRIEDVLSDAVTHVVAENNSADELWQWLQNSSLGDLSKIEVLDISWFTECMGAGKPVQVEARHCLVKSCPVIDQYLEPSTVETVSQYACQRRTTMENHNQIFTDAFAILAENAEFNESEGPCLAFRRAASLLKSLPHAISSSKDLEGLPCLGDQTKAVIEDILEYGQCSKVQDVLCDDRYQTIKLFTSVFGVGLKTAEKWYRKGFHSLEEVQADNSIHFTKMQKAGFLYYDDISAAVCKAEADAIGQIVEETVRLIAPDAIVTLTGGFRRGKECGHDVDFLITTPEMGKEVWLLNRLINRLQNQGILLYYDIVESTFDKTRLPCRKFEAMDHFQKCFAIIKLKKELAAGRVQKDWKAIRVDFVAPPVDNFAFALLGWTGSRQFERDLRRFARHERKMLLDNHALYDKTKKIFLPAKTEEDIFAHLGLDYIPPWQRNA

SEQ ID NO: 60 - protein, 494 aa, Artificial Sequence
  Modified TdT Sequences
MLHIPIFPPIKKRQKLPESRNSCKYEVKFSEVAIFLVERKMGSSRRKFLTNLARSKGFRIEDVLSDAVTHVVAEDNSADELWQWLQNSSLGDLSKIEVLDISWFTECMEAGKPVQVEARHCLVKSCPVIDQYLEPSTVETVSQYACQRRTTMENHNQIFTDAFAILAENAEFNESEGPCLAFRRAASLLKSLPHAISSSKDLEGLPCLGDQTKAVIEDILEYGQCSKVQDVLCDDRYQTIKLFTSVFGVGLKTAEKWYRKGFHSLEEVQADKAIHFTKMQKAGFLYYDDISAAVCKAEADAIGQIVEETVRLIAPDAIVTLTGGFRRGKECGHDVDFLITTPEMGKEVWLLNRLINRLQNQGILLYYDIVESTFDKTRLPCRKFEAMDHFQKCFAIIKLKKELAAGRVQKDWKAIRVDFVMPPVDNFAFALLGWTGSRQFERDLRRFARHERKMLLDRHALYDKTKKIFLPAKTEEDIFAHLGLDYIPPWQRNA

SEQ ID NO: 61 - protein, 494 aa, Artificial Sequence
  Modified TdT Sequences
MLHIPIFPPIKKRQKLPESRNSCKYEVKFSEVAIFLVERKMGSTRRKFLTNLARSKGFRIEDVLSDAVTHVVAEDNSADELWQWLQNSSLGDLSKIEVLDISWFTECMEAGKPVQVEARHCLVKSCPVIDQYLEPSTVETVSQYACQRRTTMENHNQIFTDAFAILAENAEFNESEGPCLAFRRAASLLKSLPHAISSSKDLEGLPCLGDQTKAVIEDILEYGQCSKVQDVLCDDRYQTIKLFTSVFGVGLKTAEKWYRKGFHSLEEVQADKAIHFTKMQKAGFLYYDDISAAVCKAEADAIGQIVEETVRLIAPDAIVTLTGGFRRGKECGHDVDFLITTPEMGKEVWLLNRLINRLQKQGILLYYDIVESTFDKTRLPCRKFEAMDHFQKCFAIIKLKKELAAGRVQKDWKAIRVDFVMPPVDNFAFALLGWTGSKQFERDLRRFARHERKMLLDNHALYDKTKKIFLPAKTEEDIFAHLGLDYIPPWQRNA

SEQ ID NO: 62 - protein, 494 aa, Artificial Sequence
  Modified TdT Sequences
MLHIPIFPPIKKRQKLPESRNSCKYEVKFSEVAIFLVERKMGSSRRKFLTNLARSKGFRIEDVLSDAVTHVVAEQNSADELWQWLQNSSLGDLSKIEVLDISWFTECMEAGKPVQVEARHCLVKRCPVIDQYLEPSTVETVSQYACQRRTTMENHNQIFTDAFAILAENAEFNESEGPCLAFRRAASLLKSLPHAISSSKDLEGLPCLGDQTKAVIEDILEYGQCSKVQDVLCDDRYQTIKLFTSVFGVGLKTAEKWYRKGFHSLEEVQADKAIHFTKMQKAGFLYYDDISAAVCKAEADAIGQIVEETVRLIAPDAIVTLTGGFRRGKECGHDVDFLITTPEMGKEVWLLNRLINRLQNQGILLYYDIVESTFDKTRLPCRKFEAMDHFQKCFAIIKLKKELAAGRVQKDWKAIRVDFVMCPVDNFAFALLGWTGSRQFERDLRRFARHERKMLLDNHALYDKTKKIFLPAKTEEDIFAHLGLDYIPPWQRNA

SEQ ID NO: 63 - protein, 494 aa, Artificial Sequence
  Modified TdT Sequences
MLHIPIFPPIKKRQKLPESRNSCKYEVKFSEVAIFLVERKMGSSRRKFLTNLARSKGFRIEDVLSDAVTHVVAENNSADELWQWLQNSSLGDLSKIEVLDISWFTECMGAGKPVQVEARHCLVKSCPVIDQYLEPSTVETVSQYACQRRTTMENHNQIFTDAFAILAENAEFNESEGPCLAFRRAASLLKSLPHAISSSKDLEGLPCLGDQTKAVIEDILEYGQCSKVQDVLCDDRYQTIKLFTSVFGVGLKTAEKWYRKGFHSLEEVQADNTIHFTKMQKAGFLYYDDISAAVCKAEADAIGQIVEEAVRLIAPDAIVTLTGGFRRGKECGHDVDFLITTPEMGKEVWLLNRLINRLQNQGILLYYDIVESTFDKTRLPCRKFEAMDHFQKCFAIIKLKKELAAGRVQKDWKAIRVDFVMPPVDNFAFALLGWTGSRQFERDLRRFARHERKMLLDNHALYDKTKKIFLPAKTEEDIFAHLGLDYIPPWQRNA

SEQ ID NO: 64 - protein, 494 aa, Artificial Sequence
  Modified TdT Sequences
MLHIPIFPPIKKRQKLPESRNSCKYEVKFSEVAIFLVERKMGSSRRKFLTNLARSKGFRIEDVLSDAVTHVVAEDNSADELWQWLQNSSLGDLSKIEVLDISWFTECMEAGKPVQVEARHCLVKSCPVIDQYLEPSTVETVSQYACQRRTTMENHNQIFTDAFAILAENAEFNESEDPCLAFRRAASLLKSLPHAISSSKDLEGLPCLGDQTKAVIEDILEYGQCSKVQDVLCDDRYQTIKLFTSVFGVGLKTAEKWYRKGFHSLEEVQADNAIHFTKMQKAGFLYYDDISAAVCKAEADAIGQIVEETVRLIAPDAIVTLTGGFRRGKECGHDVDFLITTPEMGKEVWLLQRLINRLQNQGILLYYDIVESTFDKTRLPCRKFEAMDHFQKCFAIIKLKKELAAGRVQKDWKAIRVDFVMPPVDNFAFALLGWTGSRQFERDLRRFARHERKMLLDNHALYDKTKKIFLPAKTEEDIFAHLGLDYIPPWQRNA

SEQ ID NO: 65 - protein, 494 aa, Artificial Sequence
  Modified TdT Sequences
MLHIPIFPPIKKRQKLPESRNSCKYEVKFSEVAIFLVERKMGSSRRKFLTNLARSKGFRIEDVLSDAVTHVVAEDNSADELWQWLQNSSLGDLSKIEVLDISWFTECMEAGKPVQVEARHCLVKSCPVIDQYLEPSTVETVSPYACQRRTTMENHNQIFTDAFAILAENAEFNESEGPCLAFRRAASLLKSLPHAISSSRDLEGLPCLGDQTKAVIEDILEYGQCSKVQDVLCDDRYQTIKLFTSVFGVGLKTAEKWYRKGFHSLEEVQADKAIHFTKMQKAGFLYYDDISAAVCKAEAQAIGQIVEETVRLIAPDAIVTLTGGFRRGKECGHDVDFLITTPEMGKEVWLLNRLINRLQNQGILLYYDIVESTFDKTRLPCRKFEAMDHFQKCFAIIKLKKELAAGRVQKDWKAIRVDFVMPPVDNFAFALLGWTGSRQFERDLRRFARHERKMLLDNHALYDKTKKIFLPAKTEEDIFAHLGLDYIPPWQRNA

SEQ ID NO: 66 - protein, 494 aa, Artificial Sequence
  Modified TdT Sequences
MLHIPIFPPIKKRQKLPESRNSCKYEVKFSEVAIFLVERKMGSSRRKFLTNLARSKGFRIEDVLSDAVTHVVAEDNSADELWQWLQNSSLGDLSKIEVLDISWFTECMEAGKPVQVEARHCLVKSCPVIDQYLEPSTVETVSQYACQRRTTMENCNQIFTDAFAILAENAEFNESEGPCLAFRRAASLLKSLPHAISSSKDLEGLPCLGDQSKAVIEDILEYGQCSKVQDVLCDDRYQTIKLFTSVFGVGLKTAEKWYRKGFHSLEEVQADKAIHFTKMQKAGFLYYDDISAAVCKAEADAIGQIVEETVRLIAPDAIVTLTGGFRRGKECGHDVDFLITTPEMGKEVWLLNRLINRLQNQGILLYYDIVESTFDKTRLPCRKFEAMDHFQKCFAIIKLKKELAAGRVQKDWKAIRVDFVMAPVDNFAFALLGWTGSRQFERDLRRFARHERKMLLDNHALYDKTKKIFLPAKTEEDIFAHLGLDYIPPWQRNA

SEQ ID NO: 67 - protein, 494 aa, Artificial Sequence
  Modified TdT Sequences
MLHIPIFPPIKKRQKLPESRNSCKYEVKFSEVAIFLVERKMGSSRRKFLTNLARSKGFRIEDVLSDAVTHVVAEDNSADELWQWLQNSSLGDLSKIEVLDISWFTECMGAGKPVQIEARHCLVKSCPVIDQYLEPSTVETVSQYACQRRTTMENHNQIFTDAFAILAENAEFNESEGPCLAFRRAASLLKSLPHAISSSKDLEGLPCLGDQTKAVIEDILEYGQCSKVQDVLCDDRYQTIKLFTSVFGVGLKTAEKWYRKGFHSLEEVQADNAIHFTKMQKAGFLYYDDISAAVCKAEADAIGQIVEETVRLIAPDAIVTLTGGFRRGKECGHDVDFLITTPQMGKEVWLLNRLINRLQNQGILLYYDIVESTFDKTRLPCRKFEAMDHFQKCFAIIKLKKELAAGRVQKDWKAIRVDFVAPPVDNFAFALLGWTGSRQFERDLRRFARHEKKMLLDNHALYDKTKKIFLPAKTEEDIFAHLGLDYIPPWQRNA

SEQ ID NO: 68 - protein, 494 aa, Artificial Sequence
  Modified TdT Sequences
MLHIPIFPPIKKRQKLPESRNSCKYEVKFSEVAIFLVERKMGSSRRKFLTNLARSKGFRIEDVLSDAVTHVVAEDNSADELWQWLQNSSLGDLSKIEVLDISWFTECMGAGKPVQVEARHCLVKSCPVIDQYLEPSTVETVSQYACQRRTTMENHNQIFTDAFAILAENAEFNESEGPCLAFRRAASLLKSLPHAISSSKDLEGLPCLGDQSKAVIEDILEYGQCSKVQDVLCDDRYQTIKLFTSVFGVGLKTAEKWYRKGFHSLEEVQADNAIHFTKMQRAGFLYYDDISAAVCKAEADAIGQIVEETVRLIAPDAIVTLTGGFRRGKECGHDVDFLITTPEMGKEVWLLNRLINRLQNQGILLYYDIVESTFDKTRLPCRKFEAMDHFQKCFAIIKLKKELAAGRVQKDWKAIRVDFVVPPVDNFAFALLGWTGSRQFERDLRRFARHERKMLLDNHALYDKTKKIFLPAKTEEDIFAHLGLDYIPPWQRNA

SEQ ID NO: 69 - protein, 494 aa, Artificial Sequence
  Modified TdT Sequences
MLHIPIFPPIKKRQKLPESRNSCKYEVKFSEVAIFLVERKMGSSRRKFLTNLGRSKGFRIEDVLSDAVTHVVAEDNSADELWQWLQNSSLGDLSKIEVLDISWFTECMGAGKPVQVEARHCLVKSCPVIDQYLEPSTVETVSQYACQRRTTMENHNQIFTDAFAILAENAEFNESEGPCLAFMRAASLLKSLPHPISSSKDLEGLPCLGDQTSAVIEDILEYGQCSKVQDVLCDDRYQTIKLFTSVFGVGLKTAEKWYRKGFHSLEEVQADNAIHFTKMQKAGFLYYDDISAAVCKAEADAIGQIVEETVRLIAPDAIVTLTGGFRRGKECGHDVDFLITTPEMGKEVWLLNRLINRLQNQGILLYYDIVESTFDKTRLPCRKFEAMDHFQKCFAIIKLKKELAAGRVQKDWKAIRVDFVAPPVDNFAFALLGWTGSRQFERDLRRFARHERKMLLDNHALYDKTKKIFLPAKTEEDIFAHLGLDYIPPWQRNA

SEQ ID NO: 70 - protein, 494 aa, Artificial Sequence
  Modified TdT Sequences
MLHIPIFPPIKKRQKLPESRNSCKYEVKFSEVAIFLVERKMGSSRRKFLTNLARSKGFRIEDVLSDAVTHVVAEDNSADELWQWLQNSSLGDLSKIEVLDISWFTECMEAGKPVQIEARHCLVKSCPVIDQYLEPSTVETVSQYACQRRTTMENHNQIFTDAFAILAENAEFNESEGPCLAFRRAASLLKSLPHAISSSKDLEGLPCLGDQTKAVIEDILEYGQCSKVQDVLCDDRYQTIKLFTSVFGVGLKTAEKWYRKGFHSLEEVQADKAIHFTKMQRAGFLYYDDISAAVCKAEADAIGQIVEETVRLIAPDAIVTLTGGFRRGKECGHDVDFLITTPEMRKEVWLLNRLINRLQNQGILLYYDIVESTFDKTRLPCRKFEAMDHFQKCFAIIKLKKELAAGRVQKDWKAIRVDFVMPPVDNFAFALLGWTGSRQFERDLRRFARHERKMLLDNHALYDKTKKIFLPAKTEEDIFAHLGLDYIPPWQRNA

SEQ ID NO: 71 - protein, 494 aa, Artificial Sequence
  Modified TdT Sequences
MLHIPIFPPIKKRQKLPESRNSCKYEVKFSELAIFLVERKMGSSRRKFLTNLARSKGFRIEDVLSDAVTHVVAEDNSADELWQWLQNSSLGDLSKIEVLDVSWFTECMEAGKPVQVEARHCLVKSCPVIDQYLEPSTVETVSQYACQRRTTMENHNQMFTDAFAILAENAEFNESEGPCLAFRRAASLLKSLPHAISSSKDLEGLPCLGDQTKAVIEDILEYGQCSKVQDVLCDDRYQTIKLFTSVFGVGLKTAEKWYRKGFHSLEEVQADKAIHFTKMQKAGFLYYDDISAAVCKAEADAIGQIVEETVRLIAPDAIVTLTGGFRRGKECGHDVDFLITTPEMGKEVWLLNRLINRLQNQGILLYYDIVESTFDKTRLPCRKFEAMDHFQKCFAIIKLKKELAAGRVQKDWKAIRVDFVMPPVDNFAFALLGWTGSRQFERDLRRFARHERKMLLDNHALYDKTKKIFLPAKTEEDIFAHLGLDYIPPWQRNA

SEQ ID NO: 72 - protein, 494 aa, Artificial Sequence
  Modified TdT Sequences
MLHIPIFPPIKKRQKLPESRNSCKYEVKFSEVAIFLVERKMGSSRRKFLTNLARSKGFRIEDVLSDAVTHVVAEDNSADELWQWLQNSSLGDLSKIEVLDISWFTECMGAGKPVQVEARHCLVKSCPVIDQYLEPSTVETVSQYACQRRTTMENHNQIFTDAFAILAENAEFNESEGPCLAFRRAASLLKSLPHAISSSKDLEGLPCLGDQTKAVIEDILEYGQCSKVQDVLCDDRYQTIKLFTSVFGVGLKTAEKWYRKGFHSLEEVQADNAIHFTKMQKAGFLYYDDISAAVCKAEADAIGQIVEETVRLIAPDAIVTLTGGFRRGKECGHDVDFLITTPEMGKEVWLLNRLINRLQNQGILLYYDIVESTFDKTRLPCRKFEAMDHFQKCFAIIKLKKELAAGRVQKDWKAIRVDFVVAPVDNFAFALLGWTGSRQFERDLRRWARHERKMLLDNHALYDKTKKIFLPAKTEEDIFAHLGLDYIPPWQRNA

SEQ ID NO: 73 - protein, 494 aa, Artificial Sequence
  Modified TdT Sequences
MLHIPIFPPIKKRQKLPESRNSCKYEVKFSEVAIFLVERKMGSSRRKFLTNLARSKGFRIEDVLSDAVTHVVAEDNSADELWQWLQNSSLGDLSKIEVLDISWFTECMEAGKPVQVEARHCLVKSCPVIDQYLEPSTVETVSQYACQRRTTMENCNQIFTDAFAILAENAEFNESEGPCLAFRRAASLLKSLPHAISSSKDLEGLPCLGDQTKAVIEDILEYGQCSKVQDVLCDDRYQTIKLFTSVFGVGLKTAEKWYRKGFHSLEEVQADKAIHFTKMQKAGFLYYDDISAAVCKAEAQAIGQIVEETVRLIAPDAIVTLTGGFRRGKECGHDVDFLITTPEMGKEVWLLNRLINRLQNQGILLYYDIVESTFDKTRLPCRKFEAMDHFQKCFAIIKLKKELAAGRVQKDWKAIRVDFVACPVDNFAFALLGWTGSRQFERDLRRFARHERKMLLDNHALYDKTKKIFLPAKTEEDIFAHLGLDYIPPWQRNA

SEQ ID NO: 74 - protein, 494 aa, Artificial Sequence
  Modified TdT Sequences
MLHIPIFPPIKKRQKLPESRNSCKYEVKFSEVAIFLVERKMGSSRRKFLTNLARSKGFRIEDVLSDAVTHVVAEQNSADELWQWLQNSSLGDLSKIEVLDISWFTECMEAGKPVQVEARHCLVKSCPVIDQYLEPSTVETVSQYACQRRTTMENHNQIFTDAFAILAENAEFNESEGPCLEFRRAASLLKSLPHAISSSKDLEGLPCLGDQTKAVIEDILEYGQCSKVQDVLCDDRYQTIKLFTSVFGVGLKTAEKWYRKGFHSLEEVQADKAIHFTKMQKAGFLYYDDISAAVCKAEADAIGQIVEETVRLIAPDAIVTLTGGFRRGKECGHDVDFLITTPEMRKEVWLLNRLINRLQNQGILLYYDIVESTFDKTRLPCRKFEAMDHFQKCFAIIKLKKELAAGRVQKDWKAIRVDFVMPPVDNFAFALLGWTGSRQFERDLRRFARHERKMLLDNHALYDKTKKIFLPAKTEEDIFAHLGLDYIPPWQRNA

SEQ ID NO: 75 - protein, 494 aa, Artificial Sequence
  Modified TdT Sequences
MLHIPIFPPIKKRQKLPESRNSCKYEVKFSEVAIFLVERKMGSSRRKFLTNLARSKGFRIEDVLSDAVTHVVAEQNSADELWQWLQNSSLGDLSKIEVLDISWFTECMEAGKPVQVEARHCLVKSCPVIDQYLEPSTVETVSQYACQRRTTMENHNQIFTDAFAILAENAEFNESEGPCLAFRRAASLLKSLPHAISSSKDLEGLPCLGDQTKAVIEDILEYGQCSKVQDVLCDDRYQTIKLFTSVFGVGLKTAEKWYRKGFHSLEEVQADKAIHFTKMQKAGFLYYDDISAAVCKAEADAIGQIVEETVWLIAPDAIVTLTGGFRRGKECGHDVDFLITTPEMGKEVWLLNRLINRLQNQGILLYYDIVESTFDKTRLPCRKFEAMDHFQKCFAIIKLKKELAAGRVQKDWKAIRVDFVACPVDNFAFALLGWTGSRQFERDLRRFARHERKMLLDNHALYDKTKKIFLPAKTEEDIFAHLGLDYIPPWQRNA

SEQ ID NO: 76 - protein, 494 aa, Artificial Sequence
  Modified TdT Sequences
MLHIPIFPPIKKRQKLPESRNSCKYEVKFSEVAIFLVERKMGASRRKFLTNLARSKGFRIEDVLSDAVTHVVAEDNSADELWQWLQNSSLGDLSKIEVLDISWFTECMGAGKPVQVEARHCLVKSCPVIDQYLEPSTVETVSQYACQRRTTMENHNQIFTDAFAILAENAEFNESEGPCLAFRRAASLLKSLPHAISSSKDLEGLPCLGDQTSAVIEDILEYGQCSKVQDVLCDDRYQTIKLFTSVFGVGLKTAEKWYRKGFHSLEEVQADNAIHFTKMQKAGFLYYDDISAAVCKAEADAIGQIVEETVRLIAPDAIVTLTGGFRRGKECGHDVDFLITTPEMGKEVWLLNRLINRLQNQGILLYYDIVESTFDKTRLPCRKFEAMDHFQKCFAIIKLKKELAAGRVQKDWKAIRVDFVAPPVDNFAFALLGWTGSRQFERDLRRFARHERKMILDNHALYDKTKKIFLPAKTEEDIFAHLGLDYIPPWQRNA

SEQ ID NO: 77 - protein, 494 aa, Artificial Sequence
  Modified TdT Sequences
MLHIPIFPPIKKRQKLPESRNSCKYEVKFSEVAIFLVERKMGSSRRKFLTNLARSKGFRIEDVLSDAVTHVVAEDNSADELWQWLQNSSLGDLSKIEVLDISWFTECMEAGKPVQVEARHCLVKSCPVIDQYLEPSTVETVSQYACQRRTTMENHNQIFTDAFAILAENAEFNESEGPCLAFRRAASLLKSLPHAISSSKDLEGLPCLGDQSKAVIEDILEYGQCSKVQDVLCDDRYQTIKLFTSVFGVGLKTAEKWYRKGFHSLEEVQADKAIHFTKMQKAGFLYYDDISAAVCKAEADAIGQIVEETVWLIAPDAIVTLTGGFRRGKECGHDVDFLITTPEMGKEVWLLNRLINRLQNQGILLYYDIVESTFDKTRLPCRKFEAMDHFQKCFAIIKLKKELAAGRVQKDWKAIRVDFVMCPVDNFAFALLGWTGSRQFERDLRRFARHERKMLLDNHALYDKTKKIFLPAKTEEDIFAHLGLDYIPPWQRNA

SEQ ID NO: 78 - protein, 494 aa, Artificial Sequence
  Modified TdT Sequences
MLHIPIFPPIKKRQKLPESRNSCKYEVKFREVAIFLVERKMGSSRRKFLTNLARSKGFRIEDVLSDAVTHVVAEDNSADELWQWLQNSSLGDLSKIEVLDISWFTECMEAGKPVQVEARHCLVKSCPVIDQYLEPSTVETVSQYACQRRTTMENHNQIFTDAFAILAENAEFNESEGPCLAFRRAASLLKSLPHAISSSKDLEGLPCLGDQTKRVIEDILEYGQCSKVQDVLCDDRYQTIKLFTSVFGVGLKTAEKWYRKGFHSLEEVQADNAIHFTKMQKAGFLYYDDISAAVCKAEADAIGQIVEETVRLIAPDAIVTLTGGFRRGKECGHDVDFLITTPEMGKEVWLLNRLINRLQNQGILLYYDIVESTFDKTRLPCRKFEAMDHFQKCFAIIKLKKELAAGRVQKDWKAIRVDFVAPPVDNFAFALLGWTGSRQFERDLRRFARHERKMLLDNHALYDKTKKIFLPAKTEEDIFAHLGLDYIPPWQRNA

SEQ ID NO: 79 - protein, 494 aa, Artificial Sequence
  Modified TdT Sequences
MLHIPIFPPIKKRQKLPESRNSCKYEVKFSEVAIFLVERKMGSSRRKFLTNLARSKGFRIEDVLSDAVTHVVAEDNSADELWQWLQNSSLGDLSKIEVLDISWFTECMGAGKPVQVEARHCLVKSCPVIDQYLEPSTVETVSQYACQRRTTMENHNQIFTDAFAVLAENAEFNESEGPCLAFRRAASLLKSLPHAISSSKDLEGLPCLGDQSKAVIEDILEYGQCSKVQDVLCDDRYQTIKLFTSVFGVGLKTAEKWYRKGFHSLEEVQADNAIHFTKMQKAGFLYYDDISAAVCKAEADAIGQIVEETVRLIAPDAIVTLTGGFRRGKECGHDVDFLITTPEMGKEVWLLNRLINRLQNQGILLYYDIVESTFDKTRLPCRKFEAMDHFQKCFAIIKLKKELAAGRVQKDWKAIRVDFVAPPVDNFAFALLGWTGSRQFERDLRRWARHERKMLLDNHALYDKTKKIFLPAKTEEDIFAHLGLDYIPPWQRNA

SEQ ID NO: 80 - protein, 494 aa, Artificial Sequence
  Modified TdT Sequences
MLHIPIFPPIKKRQKLPESRNSCKYEVKFSEVAIFLVERKMGSSRRKFLTNLARSKGFRIEDVLSDAVTHVVAEDNSADELWQWLQNSSLGDLSKIEVLDISWFTECMGAGKPVQVEARHCLVKSCPVIDQYLEPSTVETVSQYACQRRTTMENHNKIFTDAFAILAENAEFNESEGPCLAFRRAASLLKSLPHAISSSKDLEGLPCLGDQTKAVIEDILEYGQCSKVQDVLCDDRYQTIKLFTSVFGVGLKTAEKWYRKGFHSLEEVQADNAIHFTKMQKAGFLYYDDISAAVCKAEAQAIGQIVEETVRLIAPDAIVTLTGGFRRGKECGHDVDFLITTPEMGKEVWLLNRLINRLQNQGILLYYDIVESTFDKTRLPCRKFEAMDAFQKCFAIIKLKKELAAGRVQKDWKAIRVDFVAPPVDNFAFALLGWTGSRQFERDLRRFARHERKMLLDNHALYDKTKKIFLPAKTEEDIFAHLGLDYIPPWQRNA

SEQ ID NO: 81 - protein, 494 aa, Artificial Sequence
  Modified TdT Sequences
MLHIPIFPPIKKRQKLPESRNSCKYEVKFSEVAIFLVERKMGSSRRKFLTNLARSKGFRIEDVLSDAVTHVVAEDNSADELWQWLQNSSLGDLSKIEVLDISWFTECMEAGKPVQVEARHCLVKSCPVIDQYLEPSTVETVSQYACQRRTTMENHNQIFTDAFAILAENAEFNESEGPCLAFRRAASLLKSLPHAISSSKDLEGLPCLGDQTKAVIEDILEYGQCSKVQDVLCDDRYQTIKLFTSVFGVGLKTAEKWYRKGFHSLEEVQADNAIHFTKMQKAGFLYYDDISAAVCKAEADAIGQIVEEAVRLIAPDAIVTLTGGFRRGKECGHDVDFLITTPEMGKEVWLLNRLINRLQNQGILLYYDIVESTFDKTRLPCRKFEAMDHFQKCFAIIKLKKELAAGRVQKDWKAIRVDFVAPPVDNFAFALLGWTGSRQFERDLRRFARHERKMLLDNHALYDKTKKIFLPAKTEEDIFAHLGLDYIDPWQRNA

SEQ ID NO: 82 - protein, 494 aa, Artificial Sequence
  Modified TdT Sequences
MLHIPIFPPIKKRQKLPESRNSCKYEVKFSEVAIFLVERKMGSTRRKFLTNLARSKGFRIEDVLSDAVTHVVAEQNSADELWQWLQNSSLGDLSKIEVLDISWFTECMEAGKPVQVEARHCLVKSCPVIDQYLEPSTVETVSQYACQRRTTMENHNQIFTDAFAILAENAEFNESEGPCLAFRRAASLLKSLPHAISSSKDLEGLPCLGDQTKAVIEDILEYGQCSKVQDVLCDDRYQTIKLFTSVFGVGLKTAEKWYRKGFHSLEEVQADKAIHFTKMQRAGFLYYDDISAAVCKAEADAIGQIVEETVRLIAPDAIVTLTGGFRRGKECGHDVDFLITTPEMGKEVWLLNRLINRLQNQGILLYYDIVESTFDKTRLPCRKFEAMDHFQKCFAIIKLKKELAAGRVQKDWKAIRVDFVMPPVDNFAFALLGWTGSRQFERDLRRFARHERKMLLDNHALYDKTKKIFLPAKTEEDIFAHLGLDYIPPWQRNA

SEQ ID NO: 83 - protein, 494 aa, Artificial Sequence
  Modified TdT Sequences
MLHIPIFPPIKKRQKLPESRNSCKYEVKFSEVAIFLVERKMGSSRRKFLTNLARSKGFRIEDVLSDAVTHVVAEDNSADELWQWLQNSSLGDLSKIEVLDISWFTECMEAGKPVQVEARHCLVKSCPVIDQYLEPSTVETVSQYACQRRTTMENHNQIFTDAFAILAENAEFNESEGPCLAFRRAASLLKSLPHPISSSKDLEGLPCLGDQTKAVIEDILEYGQCSKVQDVLCDDRYQTIKLFTSVFGVGLKTAEKWYRKGFHSLEEVQADNAIHFTKMQKAGFLYYDDISAAVCKAEADAIGQIVEETVRLIAPDAIVTLTGGFRRGKECGHDVDFLITTPEMGKEVWLLNRLINRLQNQGILLYYDIVESTFDKTRLPCRKFEAMDHFQKCFAIIKLKKELAAGRVQKDWKAIRVDFVAPPVDNFAFALLGWTGSRQFERDLRRFARHERKMILDNHALYDKTKKIFLPAKTEEDIFAHLGLDYIPPWQRNA

SEQ ID NO: 84 - protein, 494 aa, Artificial Sequence
  Modified TdT Sequences
MLHIPIFPPIKKRQKLPESRNSCKYEVKFREVAIFLVERKMGSSRRKFLTNLARSKGFRIEDVLSDAVTHVVAEDNSADELWQWLQNSSLGDLSKIEVLDISWFTECMGAGKPVQVEARHCLVKSCPVIDQYLEPSTVETVSQYACQRRTTMENHNQIFTDAFAILAENAEFNESEGPCLAFMRAASLLKSLPHAISSSKDLEGLPCLGDQTKAVIEDILEYGQCSKVQDVLCDDRYQTIKLFTSVFGVGLKTAEKWYRKGFHSLEEVQADNAIHFTKMQKAGFLYYDDISAAVCKAEADAIGQIVEETVRLIAPDAIVTLTGGFRRGKECGHDVDFLITSPEMGKEVWLLNRLINRLQNQGILLYYDIVESTFDKTRLPCRKFEAMDHFQKCFAIIKLKKELAAGRVQKDWKAIRVDFVAPPVDNFAFALLGWTGSRQFERDLRRFARHERKMLLDNHALYDKTKKIFLPAKTEEDIFAHLGLDYIPPWQRNA

SEQ ID NO: 85 - protein, 494 aa, Artificial Sequence
  Modified TdT Sequences
MLHIPIFPPIKKRQKLPESRNSCKYEVKFSEVAIFLVERKMGSSRRKFLTNLARSKGFRIEDVLSDAVTHVVAEDNSADELWQWLQNSSLGDLSKIEVLDISWFTECMEAGKPVQVEARHCLVKSCPVIDQYLEPSTVETVSQYACQRRTTMENHNQIFTDAFAILAENAEFNESEGPCVAFRRAASLLKSLPHAISSSKDLEGLPCLGDQTKAVIEDILEYGQCSKVQDVLCDDRYQTIKLFTSVFGVGLKTAEKWYRKGFHSLEEVQADNAIHFTKMQKAGFLYYDDISAAVCKAEADAIGQIVEETVRLIAPDAIVTLTGGFRRGKECGHDVDFLITTPEMGKEVWLLNRLINRLQNQGILLYYDIVESTFDKTRLPCRKFEAMDHFQKCFAIIKLKKELAAGRVQKDWKAIRVDFVMCPVDNFAFALLGWTGSRQFERDLRRFARHERKMLLDNHALYDKTKKIFLPAKTEEDIFAHLGLDYIPPWQRNA

SEQ ID NO: 86 - protein, 494 aa, Artificial Sequence
  Modified TdT Sequences
MLHIPIFPPIKKRQKLPESRNSCKYEVKFSEVAIFLVERKMGSSRRKFLTNLARSKGFRIEDVLSDAVTHVVAEDNSADELWQWLQNSSLGDLSKIEVLDISWFTECMGAGKPVQVEARHCLVKSCPVIDQYLEPSTVETVSQYACQRRTTMENHNQIFTDAFAILAENAEFNESEGPCLAFRRAASLLKSLPHAISSSKDLEGLPCLGDQTKAVIEDILEYGQCSKVQDVLCDDRYQTIKLFTSVFGVGLKTAEKWYRKGFHSLEEVQADNAIHFTKMQKAGFLYYDDISAAVCKAEADAIGQIVEETVRLIAPDAIVTLTGGFRRGKECGHDVDFLITTPEMGKEVWLLNRLINRLQNQGILLYCDIVESTFDKTRLPCRKFEAMDHFQKCFAIIKLKKELAAGRVQKDWKAIRVDFVACPYDNFAFALLGWTGSRQFERDLRRFARHERKMLLDNHALYDKTKKIFLPAKTEEDIFAHLGLDYIPPWQRNA

SEQ ID NO: 87 - protein, 494 aa, Artificial Sequence
  Modified TdT Sequences
MLHIPIFPPIKKRQKLPESRNSCKYEVKFSEVAIFLVERKMGSSRRKFLTNLARSKGFRIEDVLSDAVTHVVAEDNSADELWQWLQNSSLGDLSKIEVLDISWFTECMGAGKPVQVEARHCLVKSCPVIDQYLEPSTVETVSQYACQRRTTMENHNQIFTDAFAILAENAEFNESEGPCLAFMRAASLLKSLPHAISSSKDLEGLPCLGDQTKAVIEDILEYGQCSKVQDVLCDDRYQTIKLFTSVFGVGLKTAEKWYRKGFHSLEEVQADNAIHFTKMQKAGFLYYDDISAAVCKAEADAIGQIVEEAVRLIAPDAIVTLTGGFRRGKECGHDVDFLITTPEMGKEVWLLNRLINRLQNQGILLYYDIVESTFDKTRLPCRKFEAMDHFQKCFAIIKLKKELAAGRVQKDWKAIRVDFVVPPVDNFAFALLGWTGSRQFERDLRRFARHERKMLLDNHALYDKTKKIFLPAKTEEDIFAHLGLDYIPPWQRNA

SEQ ID NO: 88 - protein, 494 aa, Artificial Sequence
  Modified TdT Sequences
MLHIPIFPPIKKRQKLPESRNSCKYEVKFSEVAIFLVERKMGSSRRKFLTNLARSKGFRIEDVLSDAVTHVVAEDNSADELWQWLQNSSLGDLSKIEVLDISWFTECMEAGKPVQVEARHCLVKSCPVIDQYLEPSTVETVSQYACQRRTTMENHNQIFTDAFAILAENAEFNESEGPCLAFRRAASLLKSLPHAISSSKDLEGLPCLGDQTKAVIEDILEYGQCSKVQDVLCDDRYQTIKLFTSVFGVGLKTAEKWYRKGFHSLEEVQADNAIHFTKMQKAGFLYYDDISAAVCKAEADAIGQIVEETVRLIAPDAIVTLTGGFRRGKNCGHDVDFLITTPEMGKEVWLLNRLINRLQNQGILLYYDIVESTFDKTRLPCRKFEAMDHFQKCFAIIKLKKELAAGRVQKDWKAIRVDFVLCPVDNFAFALLGWTGSRQFERDLRRFARHERKMLLDNHALYDKTKKIFLPAKTEEDIFAHLGLDYIPPWQRNA

SEQ ID NO: 89 - protein, 494 aa, Artificial Sequence
  Modified TdT Sequences
MLHIPIFPPIKKRQKLPESRNSCKYEVKFSELAIFLVERKMGSSRRKFLTNLARSKGFRIEDVLSDAVTHVVAEDNSADELWQWLQNSSLGDLSKIEVLDISWFTECMEAGKPVQVEARHCLVKSCPVIDQYLEPSTVETVSQYACQRRTTMENHNQIFTDAFAILAENAEFNESEGPCLAFRRAASLLKSLPHAISSSKDLEGLPCLGDQTKAVIEDILEYGQCSKVQDVLCDDRYQTIKLFTSVFGVGLKTAEKWYRKGFHSLEEVQADKAIHFTKMQKAGFLYYDDISAAVCKAEADAIGQIVEETVRLIAPDAIVTLTGGFRRGKECGHDVDFLITTPEMGKEVWLLNRLINRLQNQGILLYYDIVESTFDKTRLPCRKFEAMDHFQKCFAIIKLKKELAAGRVQKDWKAIRVDFVACPVDRFAFALLGWTGSRQFERDLRRFARHERKMLLDNHALYDKTKKIFLPAKTEEDIFAHLGLDYIPPWQRNA

SEQ ID NO: 90 - protein, 494 aa, Artificial Sequence
  Modified TdT Sequences
MLHIPIFPPIKKRQKLPESRNSCKYEVKFSEVAIFLVERKMGSSRRKFLTNLARSKGFRIEDVLSDAVTHVVAEDNSADELWQWLQNSSLGDLSKIEVLDISWFTECMGAGRPVQSEARHCLVKSCPVIDQYLEPSTVETVSQYACQRRTTMENHNQIFTDAFAILAENAEFNESEGPCLAFRRAASLLKSLPHAISSSKDLEGLPCLGDQTKAVIEDILEYGQCSKVQDVLCDDRYQTIKLFTSVFGVGLKTAEKWYRKGFHSLEEVQADNAIHFTKMQKAGFLYYDDISAAVCKAEAQAIGQIVEETVRLIAPDAIVTLTGGFRRGKECGHDVDFLITTPEMGKEVWLLNRLINRLQNQGILLYYDIVESTFDKTRLPCRKFEAMDHFQKCFAIIKLKKELAAGRVQKDWKAIRVDFVAPPVDNFAFALLGWTGSRQFERDLRRFARHERKMLLDNHALYDKTKKIFLPAKTEEDIFAHLGLDYIPPWQRNA

SEQ ID NO: 91 - protein, 494 aa, Artificial Sequence
  Modified TdT Sequences
MLHIPIFPPIKKRQKLPESRNSCKYEVKFSEVAIFLVERKMGSSRRKFLTNLARSKGFRIEDVLSDAVTHVVAEDNSADELWQWLQNSSLGDLSKIEVLDISWFTECMGAGKPVQVEARHCLVKSCPVIDQYLEPSTVETVSQYACQRRTTMEHHNQIFTDAFAILAENAEFNESEGPCLAFRRAASLLKSLPHAISSSKDLEGLPCLGDQTKAVIEDILEYGQCSKVQDVLCDDRYQTIKLFTSVFGVGLKTAEKWYRKGFHTLEEVQADNSIHFTKMQKAGFLYYDDISAAVCKAEADAIGQIVEETVRLIAPDAIVTLTGGFRRGKECGHDVDFLITTPEMGKEVWLLNRLINRLQNQGILLYYDIVESTFDKTRLPCRKFEAMDHFQKCFAIIKLKKELAAGRVQKDWKAIRVDFVAPPVDNFAFALLGWTGSRQFERDLRRFARHERKMLLDNHALYDKTKKIFLPAKTEEDIFAHLGLDYIPPWQRNA

SEQ ID NO: 92 - protein, 494 aa, Artificial Sequence
  Modified TdT Sequences
MLHIPIFPPIKKRQKLPESRNSCKYEVKFSEVAIFLVERKMGSSRRKFLTNLARSKGFRIEDVLSDAVTHVVAEDNSADELWQWLQNSSLGDLSKIEVLDISWFTECMGAGRPVQVEARHCLVKSCPVIDQYLEPSTVETVSQYACQRRTTMENHNQIFTDAFAILAENAEFNESEGPCLAFRRAASLLKSLPHAISSSKDLEGLPCLGDQTKAVIEDILEYGQCSKVQDVLCDDRYQTIKLFTSVFGVGLKTAEKWYRKGLHSLEEVQADNAIHFTKMQKAGFLYYDDISAAVCKAEADAIGQIVEETVRLIAPDAIVTLTGGFRRGKECGHDVDFLITTPEMGKEVWLLNRLINRLQNQGILLYYDIVESTFDKTRLPCRKFEAMDHFQKCFAIIKLKKELAAGRVQKDWKAIRVDFVAAPVDNFAFALLGWTGSRQFERDLRRFARHERKMLLDNHALYDKTKKIFLPAKTEEDIFAHLGLDYIPPWQRNA

SEQ ID NO: 93 - protein, 494 aa, Artificial Sequence
  Modified TdT Sequences
MLHIPIFPPIKKRQKLPESRNSCKYEVKFSEVAIFLVERKMGSSRRKFLTNLARSKGFRIEDVLSDAVTHVVAEDNSADELWQWLQNSSLGDLSKIEVLDISWFTECMGAGKPVQVEARHCLVKSCPVIDQYLEPSTVETVSQYACQRRTTMENHNKIFTDAFAILAENAEFNESEGPCLAFRRAASLLKSLPHAISSSKDLEGLPCLGDQTKAVIEDILEYGQCSKVQDVLCDDRYQTIKLFTSVFGVGLKTAEKWYRKGFHSLEEVQADNAIHFTKMQKAGFLYYDDISAAVCKAEADAIGQIVEETVRLIAPDAIVTLTGGFRRGKECGHDVDFLITTPEMGKEVWLLNRLINRLQNQGILLYYDIVESTFDKTRLPCRKFEAMDHFQKCFAIIKLKKELAAGRVQKDWKAIRVDFVVPPVDNFAFALLGWTGSRQFERDLRRFARHEKKMLLDNHALYDKTKKIFLPAKTEEDIFAHLGLDYIPPWQRNA

SEQ ID NO: 94 - protein, 494 aa, Artificial Sequence
  Modified TdT Sequences
MLHIPIFPPIKKRQKLPESRNSCKYEVKFSEVAIFLVERKMGSSRRKFLTNLARSKGFRIEDVLSDAVTHVVAEDNSADELWQWLQNSSLGDLSKIEVLDISWFTECMEAGKPVQVEARHCLVKSCPVIDQYLEPSTVETVSQYACQRRTTMENHNQMFTDAFAILAENAEFNESEGPCLAFRRAASLLKSLPHAISSSKDLEGLPCLGDQTKAVIEDILEYGQCSKVQDVLCDDRYQTIKLFTSVFGVGLKTAEKWYRKGFHSLEEVQADKAIHFTKMQKAGFLYYDDISAAVCKAEADAIGQIVEETVRLIAPDAIVTLTGGFRRGKECGHDVDFLITTPEMRKEVWLLNRLINRLQNQGILLYYDIVESTFDKTRLPCRKFEAMDHFQKCFAIIKLKKELAAGRVQKDWKAIRVDFVLCPVDNFAFALLGWTGSRQFERDLRRFARHERKMLLDNHALYDKTKKIFLPAKTEEDIFAHLGLDYIPPWQRNA

SEQ ID NO: 95 - protein, 494 aa, Artificial Sequence
  Modified TdT Sequences
MLHIPIFPPIKKRQKLPESRNSCKYEVKFREVAIFLVERKMGSSRRKFLTNLARSKGFRIEDVLSDAVTHVVAENNSADELWQWLQNSSLGDLSKIEVLDISWFTECMGAGKPVQVEARHCLVKSCPVIDQYLEPSTVETVSQYACQRRTTMENHNQIFTDAFAILAENAEFNESEGPCLAFRRAASLLKSLPHAISSSKDLEGLPCLGDQTKAVIEDILEYGQCSKVQDVLCDDRYQTIKLFTSVFGVGLKTAEKWYRKGFHTLEEVQADNAIHFTKMQKAGFLYYDDISAAVCKAEADAIGQIVEETVRLIAPDAIVTLTGGFRRGKECGHDVDFLITTPEMGKEVWLLNRLINRLQNQGILLYYDIVESTFDKTRLPCRKFEAMDHFQKCFAIIKLKKELAAGRVQKDWKAIRVDFVAPPVDNFAFALLGWTGSRQFERDLRRFARHERKMLLDNHALYDKTKKIFLPAKTEEDIFAHLGLDYIDPWQRNA

SEQ ID NO: 96 - protein, 494 aa, Artificial Sequence
  Modified TdT Sequences
MLHIPIFPPIKKRQKLPESRNSCKYEVKFSEVAIFLVERKMGSSRRKFLTNLARSKGFRIEDVLSDAVTHVVAENNSADELWQWLQNSSLGDLSKIEVLDISWFTECMGAGKPVQVEARHCLVKSCPVIDQYLEPSTVETVSQYACQRRTTMENHNQIFTDAFAILAENAEFNESEGPCLAFRRAASLLKSLPHAISSSKDLEGLPCLGDQSKAVIEDILEYGQCSKVQDVLCDDRYQTIKLFTSVFGVGLKTAEKWYRKGFHSLEEVQADKAIHFTKMQKAGFLYYDDISAAVCKAEADAIGQIVEETVRLIAPDAIVTLTGGFRRGKECGHDVDFLITTPEMGKEVWLLNRLINRLQNQGILLYYDIVESTFDKTRLPCRKFEAMDHFQKCFAIIKLKKELAAGRVQKDWKAIRVDFVAPPVDNFAFALLGWTGSRQFERDLRRFARHERKMLLDNHALYDKTKKIFLPAKTEEDIFAHLGLDYIPPWQRNA

SEQ ID NO: 97 - protein, 494 aa, Artificial Sequence
  Modified TdT Sequences
MLHIPIFPPIKKRQKLPESRNSCKYEVKFSEVAIFLVERKMGSSRRKFLTNLARSKGFRIEDVLSDAVTHVVAEDNSADELWQWLQNSSLGDLSKIEVLDISWFTECMEAGKPVQVEARHCLVKSCPVIDQYLEPSTVETVSQYACQRRTTMENHNQIFTDAFAILAENAEFNESEGPCLAFRRAASLLKSLPHAISSSKDLEGLPCLGDQTKAVIEDILEYGQCSKVQDVLCDDRYQTIKLFTSVFGVGLKTAEKWYRKGFHSLEEVQADKAIHFTKMQKAGFLYYDDISAAVCKAEAQAIGQIVEETVWLIAPDAIVTLTGGFRRGKECGHDVDFLITTPEMGKEVWLLNRLINRLQNQGILLYYDIVESTFDKTRLPCRKFEAMDHFQKCFAIIKLKKELAAGRVQKDWKAIRVDFVMPPVDNFAFALLGWTGSKQFERDLRRFARHERKMLLDNHALYDKTKKIFLPAKTEEDIFAHLGLDYIPPWQRNA

SEQ ID NO: 98 - protein, 494 aa, Artificial Sequence
  Modified TdT Sequences
MLHIPIFPPIKKRQKLPESRNSCKYEVKFSEVAIFLVERKMGSSRRKFLTNLARSKGFRIEDVLSDAVTHVVAENNSADELWQWLQNSSLGDLSKIEVLDISWFTECMGAGKPVQVEARHCLVKSCPVIDQYLEPSTVETVSQYACQRRTTMENHNQIFTDAFAILAENAEFNESEGPCLAFMRAASLLKSLPHAISSSKDLEGLPCLGDQTKAVIEDILEYGQCSKVQDVLCDDRYQTIKLFTSVFGVGLKTAEKWYRKGFHSLEEVQADNAIHFTKMQKAGFLYYDDINAAVCKAEADAIGQIVEETVRLIAPDAIVTLTGGFRRGKECGHDVDFLITTPEMGKEVWLLNRLINRLQNQGILLYYDIVESTFDKTRLPCRKFEAMDHFQKCFAIIKLKKELAAGRVQKDWKAIRVDFVAPPVDNFAFALLGWTGSRQFERDLRRFARHERKMLLDNHALYDKTKKIFLPAKTEEDIFAHLGLDYIPPWQRNA

SEQ ID NO: 99 - protein, 494 aa, Artificial Sequence
  Modified TdT Sequences
MLHIPIFPPIKKRQKLPESRNSCKYEVKFSEVAIFLVERKMGSSRRKFLTNLARSKGFRIEDVLSDAVTHVVAEDNSADELWQWLQNSSLGDLSKIEVLDISWFTECMGAGKPVEVEARHCLVKSCPVIDQYLEPSTVETVSQYACQRRTTMENHNQIFTDAFAILAENAEFNESEGPCLAFRRAASLLKSLPHAISSSKDLEGLPCLGDQTKAVIEDILEYGQCSKVQDVLCDDRYQTIKLFTSVFGVGLKTAEKWYRKGLHSLEEVQADNAIHFTKMQKAGFLYYDDISAAVCKAEADAIGQIVEETVRLIAPDAIVTLTGGFRRGKECGHDVDFLITTPEMGKEVWLLNRLINRLQNQGILLYYDIVESTFDKTRLPCRKFEAMDHFQKCFAIIKLKKELAAGRVQKDWKAIRVDFVMPPVDNFAFALLGWTGSRQFERDLRRFARHERKMLLDNHALYDKTKKIFLPAKTEEDIFAHLGLDYIPPWQRNA

SEQ ID NO: 100 - protein, 494 aa, Artificial Sequence
  Modified TdT Sequences
MLHIPIFPPIKKRQKLPESRNSCKYEVKFSEVAIFLVERKMGSSRRKFLTNLARSKGFRIEDVLSDAVTHVVAEDNSADELWQWLQNSSLGDLSKIEVLDISWFTECMEAGKPVQVEARHCLVKSCPVIDQYLEPSTVETVSQYACQRRTTMENHNQIFTDAFAILAENAEFNESEGPCLAFRRAASLLKSLPHAISSSKDLEGLPCLGDQTKAVIEDILEYGQCSKVQDVLCDDRYQTIKLFTSVFGVGLKTAEKWYRKGFHSLEEVQADKAIHFTKMQRAGFLYYDDISAAVCRAEAQAIGQIVEETVRLIAPDAIVTLTGGFRRGKECGHDVDFLITTPEMGKEVWLLNRLINRLQNQGILLYYDIVESTFDKTRLPCRKFEAMDHFQKCFAIIKLKKELAAGRVQKDWKAIRVDFVMPPVDNFAFALLGWTGSRQFERDLRRFARHERKMLLDNHALYDKTKKIFLPAKTEEDIFAHLGLDYIPPWQRNA

SEQ ID NO: 101 - protein, 494 aa, Artificial Sequence
  Modified TdT Sequences
MLHIPIFPPIKKRQKLPESRNSCKYEVKFSEVAIFLVERKMGSTRRKFLTNLARSKGFRIEDVLSDAVTHVVAEDNSADELWQWLQNSSLGDLSKIEVLDISWFTECMEAGKPVQVEARHCLVKSCPVIDQYLEPSTVETVSQYACQRRTTMENHNQIFTDAFAILAENAEFNESEGPCLAFRRAASLLKSLPHAISSSKDLEGLPCLGDQTKAVIEDILEYGQCSKVQDVLCDDRYQTIKLFTSVFGVGLKTAEKWYRKGFHSLEEVQADKAIHFTKMQKAGFLYYDDISAAVCKAEADAIGQIVEETVRLIAPDAIVTLTGGFRRGKECGHDVDFLITTPEMGKEVWLLQRLINRLQNQGILLYYDIVESTFDKTRLPCRKFEAMDHFQKCFAIIKLKKELAAGRVQKDWKAIRVDFVACPVDNFAFALLGWTGSRQFERDLRRFARHERKMLLDNHALYDKTKKIFLPAKTEEDIFAHLGLDYIPPWQRNA

SEQ ID NO: 102 - protein, 494 aa, Artificial Sequence
  Modified TdT Sequences
MLHIPIFPPIKKRQKLPESRNSCKYEVKFSEVAIFLVERKMGSSRRKFLTNLARSKGFRIENVLSDAVTHVVAEQNSADELWQWLQNSSLGDLSKIEVLDISWFTECMEAGKPVQVEARHCLVKSCPVIDQYLEPSTVETVSQYACQRRTTMENHNQMFTDAFAILAENAEFNESEGPCLAFRRAASLLKSLPHAISSSKDLEGLPCLGDQTKAVIEDILEYGQCSKVQDVLCDDRYQTIKLFTSVFGVGLKTAEKWYRKGFHSLEEVQADKAIHFTKMQKAGFLYYDDISAAVCKAEADAIGQIVEETVRLIAPDAIVTLTGGFRRGKECGHDVDFLITTPEMGKEVWLLNRLINRLQNQGILLYYDIVESTFDKTRLPCRKFEAMDHFQKCFAIIKLKKELAAGRVQKDWKAIRVDFVMPPVDNFAFALLGWTGSRQFERDLRRFARHERKMLLDNHALYDKTKKIFLPAKTEEDIFAHLGLDYIPPWQRNA

SEQ ID NO: 103 - protein, 494 aa, Artificial Sequence
  Modified TdT Sequences
MLHIPIFPPIKKRQKLPESRNSCKYEVKFSEVAIFLVERKMGSSRRKFLTNLARSKGFRIEDVLSDAVTHVVAEDNSADELWQWLQNSSLGDLSKIEVLDISWFTECMGAGKPVQVEARHCLVKSCPVIDQYLEPSTVETVSQYACQRRTTMENHNQIFTDAFAILAENAEFNESEGPCLAFRRAASLLKSLPHAISSSKDLEGLPCLGDQTKAVIEDILEYGQCSKVQDVLCDDRYQTIKLFTSVFGVGLKTAEKWYRKGFHSLEEVQADKAIHFTKMQKAGFLYYDDISAAVCKAEAQAIGQIVEETVRLIAPDAIVTLTGGFRRGKECGHDVDFLITTPEMGKEVWLLNRLINRLQNQGILLYYDIVESTFDKTRLPCRKFEAMDHFQKCFAIIKLKKELAAGRVQKDWKAIRVDFVACPVDNFAFALLGWTGSRQFERDLRRFARHERKMLLDNHALYDKTKKIFLPAKTEEDIFAHLGLDYIPPWQRNA

SEQ ID NO: 104 - protein, 494 aa, Artificial Sequence
  Modified TdT Sequences
MLHIPIFPPIKKRQKLPESRNSCKYEVKFSEVAIFLVERKMGSSRRKFLTNLARSKGFRIEDVLSDAVTHVVAEDNSADELWQWLQNSSLGDLSKIEVLDISWFTECMGAGKPVQVEARHCLVKSCPVIDQYLEPSTVETVSQYACQRRTTMENHNQIFTDAFAVLAENAEFNESEGPCLAFRRAASLLKSLPHAISSSKDLEGLPCLGDQTKAVIEDILEYGQCSKVQDVLCDDRYQTIKLFTSVFGVGLKTAEKWYRKGFHSLEEVKADNTIHFTKMQKAGFLYYDDISAAVCKAEADAIGQIVEETVRLIAPDAIVTLTGGFRRGKECGHDVDFLITTPEMGKEVWLLNRLINRLQNQGILLYYDIVESTFDKTRLPCRKFEAMDHFQKCFAIIKLKKELAAGRVQKDWKAIRVDFVAPPVDNFAFALLGWTGSRQFERDLRRFARHERKMLLDNHALYDKTKKIFLPAKTEEDIFAHLGLDYIPPWQRNA

SEQ ID NO: 105 - protein, 494 aa, Artificial Sequence
  Modified TdT Sequences
MLHIPIFPPIKKRQKLPESRNSCKYEVKFSEVAIFLVERKMGSSRRKFLTNLARSKGFRIEDVLSDAVTHVVAEDNSADELWQWLQNSSLGDLSKIEVLDISWFTECMGAGKPVQVEARHCLVKSCPVIDQYLEPSTVETVSQYACQRRTTMENHNQIFTDAFAILAENAEFNESEGPCLAFRRAASLLKSLPHAISSSKDLEGLPCLGDQTKAVIEDILEYGQCSKVQDVLCDDRYQSIKLFTSVFGVGLKTAEKWYRKGLHSLEEVQADNAIHFTKMQKAGFLYYDDINAAVCKAEADAIGQIVEETVRLIAPDAIVTLTGGFRRGKECGHDVDFLITTPEMGKEVWLLNRLINRLQNQGILLYCDIVESTFDKTRLPCRKFEAMDHFQKCFAIIKLKKELAAGRVQKDWKAIRVDFVAPPVDNFAFALLGWTGSRQFERDLRRFARHERKMLLDNHALYDKTKKIFLPAKTEEDIFAHLGLDYIPPWQRNA

SEQ ID NO: 106 - protein, 494 aa, Artificial Sequence
  Modified TdT Sequences
MLHIPIFPPIKKRQKLPESRNSCKYEVKFSEVAIFLVERKMGSSRRKFLTNLARSKGFRIEDVLSDAVTHVVAEQNSADELWQWLQNSSLGDLSKIEVLDISWFTECMGAGKPVQVEARHCLVKSCPVIDQYLEPSTVETVSQYACQRRTTMENHNQIFTDAFAILAENAEFNESEGPCLAFRRAASLLKSLPHAISSSKDLEGLPCLGDQTKAVIEDILEYGQCSKVQDVLCDDRYQTIKLFTSVFGVGLKTAEKWYRKGFHSLEEVQADNAIHFTKMQKAGFLYYDDISAAVCKAEADAIGQIVEETVRLIAPDAIVTLTGGFRRGKECGHDVDFLITTPEMGKEVWLLNRLINRLQNQGILLYYDIVESTFDKTRLPCRKFEAMDAFQKCFAIIKLKKELAAGRVQKDWKAIRVDFVAPPYDNFAFALLGWTGSRQFERDLRRFARHERKMLLDNHALYDKTKKIFLPAKTEEDIFAHLGLDYIPPWQRNA

SEQ ID NO: 107 - protein, 494 aa, Artificial Sequence
  Modified TdT Sequences
MLHIPIFPPIKKRQKLPESRNSCKYEVKFSEIAIFLVERKMGSSRRKFLTNLARSKGFRIEDVLSDAVTHVVAEDNSADELWQWLQNSSLGDLSKIEVLDISWFTECMEAGKPVQIEARHCLVKSCPVIDQYLEPSTVETVSQYACQRRTTMENHNQIFTDAFAILAENAEFNESEGPCLAFRRAASLLKSLPHAISSSKDLEGLPCLGDQTKAVIEDILEYGQCSKVQDVLCDDRYQTIKLFTSVFGVGLKTAEKWYRKGFHSLEEVQADKAIHFTKMQKAGFLYYDDISAAVCKAEADAIGQIVEETVRLIAPDAIVTLTGGFRRGKECGHDVDFLITTPEMGKEVWLLNRLINRLQNQGILLYYDIVESTFDKTRLPCRKFEAMDHFQKCFAIIKLKKELAAGRVQKDWKAIRVDFVMAPVDNFAFALLGWTGSRQFERDLRRFARHERKMLLDNHALYDKTKKIFLPAKTEEDIFAHLGLDYIPPWQRNA

SEQ ID NO: 108 - protein, 494 aa, Artificial Sequence
  Modified TdT Sequences
MLHIPIFPPIKKRQKLPESRNSCKYEVKFSEVAIFLVERKMGSTRRKFLTNLARSKGFRIEDVLSDAVTHVVAEDNSADELWQWLQNSSLGDLSKIEVLDISWFTECMEAGKPVQVEARHCLVKSCPVIDQYLEPSTVETVSQYACQRRTTMENHNQIFTDAFAILAENAEFNESEGPCLAFRRAASLLKSLPHAISSSKDLEGLPCLGDQTKAVIEDILEYGQCSKVQDVLCDDRYQTIKLFTSVFGVGLKTAEKWYRKGFHSLEEVQADKAIHFTKMQKAGFLYYDDISAAVCKAEADAIGQIVEETVRLIAPDAIVTLTGGFRRGKECGHDVDFLITTPEMGKEVWLLNRLINRLQNQGLLLYYDIVESTFDKTRLPCRKFEAMDHFQKCFAIIKLKKELAAGRVQKDWKAIRVDFVMPPVDRFAFALLGWTGSRQFERDLRRFARHERKMLLDNHALYDKTKKIFLPAKTEEDIFAHLGLDYIPPWQRNA

SEQ ID NO: 109 - protein, 494 aa, Artificial Sequence
  Modified TdT Sequences
MLHIPIFPPIKKRQKLPESRNSCKYEVKFSEVAIFLVERKMGSSRRKFLTNLARSKGFRIEDVLSDAVTHVVAENNSADELWQWLQNSSLGDLSKIEVLDISWFTECMGAGKPVQSEARHCLVKSCPVIDQYLEPSTVETVSQYACQRRTTMENHNQIFTDAFAILAENAEFNESEGPCLAFRRAASLLKSLPHAISSSKDLEGLPCLGDQTKAVIQDILEYGQCSKVQDVLCDDRYQTIKLFTSVFGVGLKTAEKWYRKGFHSLEEVQADNAIHFTKMQKAGFLYYDDISAAVCKAEADAIGQIVEETVRLIAPDAIVTLTGGFRRGKECGHDVDFLITTPEMGKEVWLLNRLINRLQNQGILLYYDIVESTFDKTRLPCRKFEAMDHFQKCFAIIKLKKELAAGRVQKDWKAIRVDFVAPPVDNFAFALLGWTGSRQFERDLRRFARHERKMLLDNHALYDKTKKIFLPAKTEEDIFAHLGLDYIPPWQRNA

SEQ ID NO: 110 - protein, 494 aa, Artificial Sequence
  Modified TdT Sequences
MLHIPIFPPIKKRQKLPESRNSCKYEVKFSEVAIFLVERKMGSSRRKFLTNLARSKGFRIEDVLSDAVTHVVAEDNSADELWQWLQNSSLGDLSKIEVLDVSWFTECMEAGKPVQIEARHCLVKSCPVIDQYLEPSTVETVSQYACQRRTTMENHNQIFTDAFAILAENAEFNESEGPCLAFRRAASLLKSLPHAISSSKDLEGLPCLGDQTKAVIEDILEYGQCSKVQDVLCDDRYQTIKLFTSVFGVGLKTAEKWYRKGFHSLEEVQADKAIHFTKMQKAGFLYYDDISAAVCKAEAQAIGQIVEETVRLIAPDAIVTLTGGFRRGKECGHDVDFLITTPEMGKEVWLLNRLINRLQNQGILLYYDIVESTFDKTRLPCRKFEAMDHFQKCFAIIKLKKELAAGRVQKDWKAIRVDFVMPPVDNFAFALLGWTGSRQFERDLRRFARHERKMLLDNHALYDKTKKIFLPAKTEEDIFAHLGLDYIPPWQRNA

SEQ ID NO: 111 - protein, 494 aa, Artificial Sequence
  Modified TdT Sequences
MLHIPIFPPIKKRQKLPESRNSCKYEVKFSEVAIFLVERKMGSSRRKFLTNLARSKGFRIEDVLSDAVTHVVAEDNSADELWQWLQNSSLGDLSKIEVLDISWFTECMGAGKPVQSEARHCLVKSCPVIDQYLEPSTVETVSQYACQRRTTMENHNQIFTDAFAILAENAEFNESEGPCLAFRRAASLLKSLPHAISSSKDLEGLPCLGDQTKAVIEDILEYGQCSKVQDVLCDDRYQTIKLFTSVFGVGLKTAEKWYRKGLHSLEEVQADNAIHFTKMQKAGFLYYDDISAAVCKAEADAIGQIVEETVRLIAPDAIVTLTGGFRRGKECGHDVDFLITSPEMGKEVWLLNRLINRLQNQGILLYYDIVESTFDKTRLPCRKFEAMDAFQKCFAIIKLKKELAAGRVQKDWKAIRVDFVAPPVDNFAFALLGWTGSRQFERDLRRFARHERKMLLDNHALYDKTKKIFLPAKTEEDIFAHLGLDYIPPWQRNA

SEQ ID NO: 112 - protein, 494 aa, Artificial Sequence
  Modified TdT Sequences
MLHIPIFPPIKKRQKLPESRNSCKYEVKFSEVAIFLVERKMGSSRRKFLTNLARSKGFRIEDVLSDAVTHVVAEDNSADELWQWLQNSSLGDLSKIEVLDISWFTECMEAGKPVQVEARHCLVKSCPVIDQYLEPSTVETVSQYACQRRTTMENHNQIFTDAFAILAENAEFNESEGPCLAFRRAASLLKSLPHAISSSKDLEGLPCLGDQTKAVIEDILEYGQCSKVQDVLCDDRYQTIKLFTSVFGVGLKTAEKWYRKGFHSLEEVQADKAIHFTKMQKAGFLYYDDISAAVCKAEADAIGQIVEETVRLIAPDAIVTLTGGFRRGKECGHDVDFLITTPEMGKEVWLLNRLINRLQKQGILLYYDIVESTFDKTRLPCRKFEAMDHFQKCFAIIKLKKELAARRVQKDWKAIRVDFVACPVDNFAFALLGWTGSRQFERDLRRFARHERKMLLDNHALYDKTKKIFLPAKTEEDIFAHLGLDYIPPWQRNA

SEQ ID NO: 113 - protein, 494 aa, Artificial Sequence
  Modified TdT Sequences
MLHIPIFPPIKKRQKLPESRNSCKYEVKFSEVAIFLVERKMGSSRRKFLTNLARSKGFRIEDVLSDAVTHVVAEDNSADELWQWLQNSSLGDLSKIEVLDISWFTECMGAGKPVEVEARHCLVKSCPVIDQYLEPSTVETVSQYACQRRTTMENHNQIFTDAFAILAENAEFNESEGPCLAFRRAASLLKSLPHAISSSKDLEGLPCLGDQSKAVIEDILEYGQCSKVQDVLCDDRYQTIKLFTSVFGVGLKTAEKWYRKGFHSLEEVQADNAIHFTKMQKAGFLYYDDISAAVCKAEADAIGQIVEETVRLIAPDAIVTLTGGFRRGKECGHDVDFLITTPEMGKEVWLLNRLINRLQNQGILLYCDIVESTFDKTRLPCRKFEAMDHFQKCFAIIKLKKELAAGRVQKDWKAIRVDFVAPPVDNFAFALLGWTGSRQFERDLRRFARHERKMLLDNHALYDKTKKIFLPAKTEEDIFAHLGLDYIPPWQRNA

SEQ ID NO: 114 - protein, 494 aa, Artificial Sequence
  Modified TdT Sequences
MLHIPIFPPIKKRQKLPESRNSCKYEVKFSEVAIFLVERKMGSSRRKFLTNLARSKGFRIEDVLSDAVTHVVAEQNSADELWQWLQNSSLGDLSKIEVLDISWFTECMEAGKPVQVEARHCLVKSCPVIDQYLEPSTVETVSQYACQRRTTMENHNQIFTDAFAILAENAEFNESEGPCLAFRRAASLLKSLPHAISSSKDLEGLPCLGDQSKAVIEDILEYGQCSKVQDVLCDDRYQTIKLFTSVFGVGLKTAEKWYRKGFHSLEEVQADKAIHFTKMQKAGFLYYDDISAAVCRAEADAIGQIVEETVRLIAPDAIVTLTGGFRRGKECGHDVDFLITTPEMGKEVWLLNRLINRLQNQGILLYYDIVESTFDKTRLPCRKFEAMDHFQKCFAIIKLKKELAAGRVQKDWKAIRVDFVMPPVDNFAFALLGWTGSRQFERDLRRFARHERKMLLDNHALYDKTKKIFLPAKTEEDIFAHLGLDYIPPWQRNA

SEQ ID NO: 115 - protein, 494 aa, Artificial Sequence
  Modified TdT Sequences
MLHIPIFPPIKKRQKLPESRNSCKYEVKFREVAIFLVERKMGSSRRKFLTNLARSKGFRIEDVLSDAVTHVVAEDNSADELWQWLQNSSLGDLSKIEVLDISWFTECMGAGKPVQVEARHCLVKSCPVIDQYLEPSTVETVSQYACQRRTTMENHNKIFTDAFAILAENAEFNESEGPCLAFRRAASLLKSLPHAISSSKDLEGLPCLGDQTKAVIEDILEYGQCSKVQDVLCDDRYQTIKLFTSVFGVGLKTAEKWYRKGFHSLEEVQADKAIHFTKMQKAGFLYYDDISAAVCKAEADAIGQIVEETVRLIAPDAIVTLTGGFRRGKECGHDVDFLITTPEMGKEVWLLNRLINRLQNQGILLYYDIVESTFDKTRLPCRKFEAMDHFQKCFAIIKLKKELAAGRVQKDWKAIRVDFVAPPVDNFAFALLGWTGSRQFERDLRRFARHERKMLLDNHALYDKTKKIFLPAKTEEDIFAHLGLDYIPPWQRNA

SEQ ID NO: 116 - protein, 494 aa, Artificial Sequence
  Modified TdT Sequences
MLHIPIFPPIKKRQKLPESRNSCKYEVKFSEVAIFLVERKMGSSRRKFLTNLARSKGFRIEDVLSDAVTHVVAEDNSADELWQWLQNSSLGDLSKIEVLDISWFTECMEAGKPVQVEARHCLVKSCPVIDQYLEPSTVETVSQYACQRRTTMENHNQIFTDAFAILAENAEFNESEGPCLAFRRAASLLKSLPHAISSSKDLEGLPCLGDQTKAVIEDILEYGQCSKVQDVLCDDRYQTIKLFTSVFGVGLKTAEKWYRKGFHSLEEVQADKAIHFTKMQKAGFLYYDDISAAVCKAEADAIGQIVEETVRLIAPDAIVTLTGGFRRGKECGHDVDFLITTPEMGKEVWLLNRLINRLQNQGLLLYYDIVESTFDKTRLPCRKFEAMDHFQKCFAIIKLKKERAAGRVQKDWKAIRVDFVMCPVDNFAFALLGWTGSRQFERDLRRFARHERKMLLDNHALYDKTKKIFLPAKTEEDIFAHLGLDYIPPWQRNA

SEQ ID NO: 117 - protein, 494 aa, Artificial Sequence
  Modified TdT Sequences
MLHIPIFPPIKKRQKLPESRNSCKYEVKFSEVAIFLVERKMGSSRRKFLTNLARSKGFRIEDVLSDAVTHVVAEDNSADELWQWLQNSSLGDLSKIEVLDISWFTECMRAGKPVQVEARHCLVKSCPVIDQYLEPSTVETVSQYACQRRTTMENHNQIFTDAFAILAENAEFNESEGPCLAFRRAASLLKSLPHAISSSKDLEGLPCLGDQTKAVIEDILEYGQCSKVQDVLCDDRYQTIKLFTSVFGVGLKTAEKWYRKGFHSLEEVQADKAIHFTKMQKAGFLYYDDISAAVCKAEADAIGQIVEETVWLIAPDAIVTLTGGFRRGKECGHDVDFLITTPEMGKEVWLLNRLINRLQNQGILLYYDIVESTFDKTRLPCRKFEAMDHFQKCFAIIKLKKELAARRVQKDWKAIRVDFVMPPVDNFAFALLGWTGSRQFERDLRRFARHERKMLLDNHALYDKTKKIFLPAKTEEDIFAHLGLDYIPPWQRNA

SEQ ID NO: 118 - protein, 494 aa, Artificial Sequence
  Modified TdT Sequences
MLHIPIFPPIKKRQKLPESRNSCKYEVKFSEVAIFLVERKMGSSRRKFLTNLARSKGFRIEDVLSDAVTHVVAEDNSADELWQWLQNSSLGDLSKIEVLDISWFTECMGAGRPVQVEARHCLVKSCPVIDQYLEPSTVETVSQYACQRRTTMEHHNQIFTDAFAILAENAEFNESEGPCLAFRRAASLLKSLPHAISSSKDLEGLPCLGDQTKAVIEDILEYGQCSKVQDVLCDDRYQTIKLFTSVFGVGLKTAEKWYRKGFHSLEEVQADNAIHFTKMQKAGFLYYDDISAAVCKAEADAIGQIVEETVRLIAPDAIVTLTGGFRRGKECGHDVDFLITTPEMGKEVWLLNRLINRLQNQGILLYYDIVESTFDKTRLPCRKFEAMDHFQKCFAIIKLKKELAAGRVQKDWKAIRVDFVAPPYDNFAFALLGWTGSRQFERDLRRFARHERKMLLDNHALYDKTKKIFLPAKTEEDIFAHLGLDYIPPWQRNA

SEQ ID NO: 119 - protein, 494 aa, Artificial Sequence
  Modified TdT Sequences
MLHIPIFPPIKKRQKLPESRNSCKYEVKFSEVAIFLVERKMGSSRRKFLTNLARSKGFRIEDVLSDAVTHVVAEQNSADELWQWLQNSSLGDLSKIEVLDISWFTECMGAGKPVQIEARHCLVKSCPVIDQYLEPSTVETVSQYACQRRTTMENHNKIFTDAFAILAENAEFNESEGPCLAFRRAASLLKSLPHAISSSKDLEGLPCLGDQTKAVIEDILEYGQCSKVQDVLCDDRYQTIKLFTSVFGVGLKTAEKWYRKGFHSLEEVQADNAIHFTKMQKAGFLYYDDISAAVCKAEADAIGQIVEETVRLIAPDAIVTLTGGFRRGKECGHDVDFLITTPEMGKEVWLLNRLINRLQNQGILLYYDIVESTFDKTRLPCRKFEAMDHFQKCFAIIKLKKELAAGRVQKDWKAIRVDFVAPPVDNFAFALLGWTGSRQFERDLRRFARHERKMLLDNHALYDKTKKIFLPAKTEEDIFAHLGLDYIPPWQRNA

SEQ ID NO: 120 - protein, 494 aa, Artificial Sequence
  Modified TdT Sequences
MLHIPIFPPIKKRQKLPESRNSCKYEVKFSEVAIFLVERKMGSSRRKFLTNLARSKGFRIEDVLSDAVTHVVAEQNSADELWQWLQNSSLGDLSKIEVLDISWFTECMEAGKPVQVEARHCLVKSCPVIDQYLEPSTVETVSQYACQRRTTMENHNQIFTDAFAILAENAEFNESEGPCLAFRRAASLLKSLPHAISSSKDLEGLPCLGDQTKAVIEDILEYGQCSKVQDVLCDDRYQTIKLFTSVFGVGLKTAEKWYRKGFHSLEEVQADKAIHFTKMQKAGFLYYDDISAAVCKAEADAIGQIVEETVRLIAPDAIVTLTGGFRRGKECGHDVDFLITTPEMGKEVWLLNRLINRLQKQGILLYYDIVESTFDKTRLPCRKFEAMDHFQKCFAIIKLKKELAAGRVQKDWKAIRVDFVACPVDNFAFALLGWTGSRQFERDLRRFARHERKMLLDNHALYDKTKKIFLPAKTEEDIFAHLGLDYIPPWQRNA

SEQ ID NO: 121 - protein, 494 aa, Artificial Sequence
  Modified TdT Sequences
MLHIPIFPPIKKRQKLPESRNSCKYEVKFSEVAIFLVERKMGSSRRKFLTNLARSKGFRIEDVLSDAVTHVVAEDNSADELWQWLQNSSLGDLSKIEVLDISWFTECMEAGKPVQVEARHCLVKRCPVIDQYLEPSTVETVSQYACQRRTTMENHNQIFTDAFAILAENAEFNESEGPCLAFRRAASLLKSLPHAISSSKDLEGLPCLGDQTKAVIEDILEYGQCSKVQDVLCDDRYQTIKLFTSVFGVGLKTAEKWYRKGFHSLEEVQADKAIHFTKMQRAGFLYYDDISAAVCKAEADAIGQIVEETVRLIAPDAIVTLTGGFRRGKECGHDVDFLITTPEMGKEVWLLNRLINRLQNQGILLYYDIVESTFDKTRLPCRKFEAMDHFQKCFAIIKLKKELAARRVQKDWKAIRVDFVMPPVDNFAFALLGWTGSRQFERDLRRFARHERKMLLDNHALYDKTKKIFLPAKTEEDIFAHLGLDYIPPWQRNA

SEQ ID NO: 122 - protein, 494 aa, Artificial Sequence
  Modified TdT Sequences
MLHIPIFPPIKKRQKLPESRNSCKYEVKFSEVAIFLVERKMGSSRRKFLTNLARSKGFRIEDVLSDAVTHVVAEDNSADELWQWLQNSSLGDLSKIAVLDISWFTECMGAGKPVQVEARHCLVKSCPVIDQYLEPSTVETVSQYACQRRTTMENHNQIFTDAFAILAENAEFNESEGPCLAFRRAASLLKSLPHAISSSKDLEGLPCLGDQTKAVIQDILEYGQCSKVQDVLCDDRYQTIKLFTSVFGVGLKTAEKWYRKGLHSLEEVQADNAIHFTKMQKAGFLYYDDISAAVCKAEADAIGQIVEETVRLIAPDAIVTLTGGFRRGKECGHDVDFLITTPEMGKEVWLLNRLINRLQNQGILLYYDIVESTFDKTRLPCRKFEAMDHFQKCFAIIKLKKELAAGRVQKDWKAIRVDFVVPPVDNFAFALLGWTGSRQFERDLRRFARHERKMLLDNHALYDKTKKIFLPAKTEEDIFAHLGLDYIPPWQRNA

SEQ ID NO: 123 - protein, 494 aa, Artificial Sequence
  Modified TdT Sequences
MLHIPIFPPIKKRQKLPESRNSCKYEVKFSEVAIFLVERKMGSSRRKFLTNLARSKGFRIENVLSDAVTHVVAEDNSADELWQWLQNSSLGDLSKIEVLDISWFTECMEAGKPVQVEARHCLVKSCPVIDQYLEPSTVETVSQYACQRRTTMENHNQIFTDAFAILAENAEFNESEGPCLAFRRAASLLKSLPHAISSSKDLEGLPCLGDQTKAVIEDILEYGQCSKVQDVLCDDRYQTIKLFTSVFGVGLKTAEKWYRKGFHSLEEVQADKAIHFTKMQKAGFLYYDDISAAVCKAEADAIGQIVEETVRLIAPDAIVTLTGGFRRGKECGHDVDFLITTPEMGKEVWLLQRLINRLQKQGILLYYDIVESTFDKTRLPCRKFEAMDHFQKCFAIIKLKKELAAGRVQKDWKAIRVDFVMPPVDNFAFALLGWTGSRQFERDLRRFARHERKMLLDNHALYDKTKKIFLPAKTEEDIFAHLGLDYIPPWQRNA

SEQ ID NO: 124 - protein, 494 aa, Artificial Sequence
  Modified TdT Sequences
MLHIPIFPPIKKRQKLPESRNSCKYEVKFSEVAIFLVERKMGSSRRKFLTNLARSKGFRIEDVLSDAVTHVVAEDNSADELWQWLQNSSLGDLSKIEVLDISWFTECMGAGKPVQVEARHCLVKSCPVIDQYLEPSTVETVSQYACQRRTTMENHNQIFTDAFAILAENAEFNESEGPCLAFRRAASLLKSLPHAISSSKDLEGLPCLGDQTKAVIQDILEYGQCSKVQDVLCDDRYQTIKLFTSVFGVGLKTAEKWYRKGFHSLEEVQADNAIHFTKMQKAGFLYYDDINAAVCKAEAQAIGQIVEETVRLIAPDAIVTLTGGFRRGKECGHDVDFLITTPEMGKEVWLLNRLINRLQNQGILLYYDIVESTFDKTRLPCRKFEAMDHFQKCFAIIKLKKELAAGRVQKDWKAIRVDFVAPPVDNFAFALLGWTGSRQFERDLRRFARHERKMLLDNHALYDKTKKIFLPAKTEEDIFAHLGLDYIPPWQRNA

SEQ ID NO: 125 - protein, 494 aa, Artificial Sequence
  Modified TdT Sequences
MLHIPIFPPIKKRQKLPESRNSCKYEVKFSEVAIFLVERKMGSSRRKFLTNLARSKGFRIEDVLSDAVTHVVAENNSADELWQWLQNSSLGDLSKIEVLDISWFTECMGAGKPVQVEARHCLVKSCPVIDQYLEPSTVETVSQYACQRRTTMENHNQIFTDAFAILAENAEFNESEGPCLAFRRAASLLKSLPHAISSSKDLEGLPCLGDQTKAVIEDILEYGQCSKVQDVLCDDRYQTIKLFTSVFGVGLKTAEKWYRKGFHSLEEVQADNAIHFTKMQRAGFLYYDDISAAVCKAEADAIGQIVEETVRLIAPDAIVTLTGGFRRGKECGHDVDFLITSPEMGKEVWLLNRLINRLQNQGILLYYDIVESTFDKTRLPCRKFEAMDHFQKCFAIIKLKKELAAGRVQKDWKAIRVDFVAPPVDNFAFALLGWTGSRQFERDLRRFARHERKMLLDNHALYDKTKKIFLPAKTEEDIFAHLGLDYIPPWQRNA

SEQ ID NO: 126 - protein, 494 aa, Artificial Sequence
  Modified TdT Sequences
MLHIPIFPPIKKRQKLPESRNSCKYEVKFSEIAIFLVERKMGSSRRKFLTNLARSKGFRIEDVLSDAITHVVAEDNSADELWQWLQNSSLGDLSKIEVLDISWFTECMEAGKPVQVEARHCLVKSCPVIDQYLEPSTVETVSQYACQRRTTMENHNQIFTDAFAILAENAEFNESEGPCLAFRRAASLLKSLPHAISSSKDLEGLPCLGDQTKAVIEDILEYGQCSKVQDVLCDDRYQTIKLFTSVFGVGLKTAEKWYRKGFHSLEEVQADKAIHFTKMQKAGFLYYDDISAAVCKAEADAIGQIVEETVRLIAPDAIVTLTGGFRRGKECGHDVDFLITTPEMGKEVWLLNRLINRLQNQGLLLYYDIVESTFDKTRLPCRKFEAMDHFQKCFAIIKLKKELAAGRVQKDWKAIRVDFVMPPVDNFAFALLGWTGSRQFERDLRRFARHERKMLLDNHALYDKTKKIFLPAKTEEDIFAHLGLDYIPPWQRNA

SEQ ID NO: 127 - protein, 494 aa, Artificial Sequence
  Modified TdT Sequences
MLHIPIFPPIKKRQKLPESRNSCKYEVKFSEVAIFLVERKMGSSRRKFLTNLGRSKGFRIEDVLSDAVTHVVAEDNSADELWQWLQNSSLGDLSKIEVLDISWFTECMGAGKPVQVEARHCLVKSCPVIDQYLEPSTVETVSQYACQRRTTMENHNQIFTDAFAILAENAEFNESEGPCLAFRRAASLLKSLPHAISSSKDLEGLPCLGDQTKAVIEDILEYGQCSKVQDVLCDDRYQSIKLFTSVFGVGLKTAEKWYRKGFHSLEEVQADNAIHFTKMQKAGFLYYDDISAAVCKAEADAIGQIVEETVRLIAPDAIVTLTGGFRRGKECGHDVDFLITTPEMGKEVWLLNRLINRLQNQGILLYYDIVESTFDKTRLPCRKFEAMDHFQKCFAIIKLKKELAAGRVQKDWKAIRVDFVVPPVDNFAFALLGWTGSRQFERDLRRFARHERKMLLDNHALYDKTKKIFLPAKTEEDIFAHLGLDYIPPWQRNA

SEQ ID NO: 128 - protein, 494 aa, Artificial Sequence
  Modified TdT Sequences
MLHIPIFPPIKKRQKLPESRNSCKYEVKFSEVAIFLVERKMGSSRRKFLTNLARSKGFRIEDVLSDAVTHVVAEDNSADELWQWLQNSSLGDLSKIEVLDISWFTECMGAGKPVQVEARHCLVKSCPVIDQYLEPSTVETVSQYACQRRTTMENHNQIFTDAFAILAENAEFNESEGPCLAFRRAASLLKSLPHAISSSKDLEGLPCLGDQTKRVIEDILEYGQCSKVQDVLCDDRYQTIKLFTSVFGVGLKTAEKWYRKGFHSLEEVKADNAIHFTKMQKAGFLYYDDISAAVCKAEADAIGQIVEETVRLIAPDAIVTLTGGFRRGKECGHDVDFLITTPEMGKEVWLLNRLINRLQNQGILLYYDIVESTFDKTRLPCRKFEAMDHFQKCFAIIKLKKELAAGRVQKDWKAIRVDFVAPPVDNFAFALLGWTGSRQFERDLRRFARHERKMLLDNHALYDKTKKIFLPAKTEEDIFAHLGLDYIDPWQRNA

SEQ ID NO: 129 - protein, 494 aa, Artificial Sequence
  Modified TdT Sequences
MLHIPIFPPIKKRQKLPESRNSCKYEVKFSEVAIFLVERKMGSSRRKFLTNLARSKGFRIEDVLSDAVTHVVAEDNSADELWQWLQNSSLRDLSKIEVLDISWFTECMEAGKPVQIEARHCLVKSCPVIDQYLEPSTVETVSQYACQRRTTMENHNQIFTDAFAILAENAEFNESEGPCLAFRRAASLLKSLPHAISSSKDLEGLPCLGDQTKAVIEDILEYGQCSKVQDVLCDDRYQTIKLFTSVFGVGLKTAEKWYRKGFHSLEEVQADKAIHFTKMQKAGFLYYDDISAAVCKAEADAIGQIVEETVRLIAPDAIVTLTGGFRRGKECGHDVDFLITTPEMGKEVWLLNRLINRLQNQGILLYYDIVESTFDKTRLPCRKFEAMDHFQKCFAIIKLKKELAAGRVQKDWKAIRVDFVACPVDNFAFALLGWTGSRQFERDLRRFARHERKMLLDNHALYDKTKKIFLPAKTEEDIFAHLGLDYIPPWQRNA

SEQ ID NO: 130 - protein, 494 aa, Artificial Sequence
  Modified TdT Sequences
MLHIPIFPPIKKRQKLPESRNSCKYEVKFSEVAIFLVERKMGASRRKFLTNLARSKGFRIEDVLSDAVTHVVAEDNSADELWQWLQNSSLGDLSKIEVLDISWFTECMGAGKPVQVEARHCLVKSCPVIDQYLEPSTVETVSQYACQRRTTMENHNQIFTDAFAILAENAEFNESEGPCLAFRRAASLLKSLPHAISSSKDLEGLPCLGDQTKAVIEDILEYGQCSKVQDVLCDDRYQTIKLFTSVFGVGLKTAEKWYRKGFHSLEEVQADNSIHFTKMQKAGFLYYDDISAAVCKAEADAIGQIVEETVRLIAPDAIVTLTGGFRRGKECGHDVDFLITTPEMGKEVWLLNRLINRLQNQGILLYYDIVESTFDKTRLPCRKFEAMDHFQKCFAIIKLKKELAAGRVQKDWKAIRVDFVAPPYDNFAFALLGWTGSRQFERDLRRFARHERKMLLDNHALYDKTKKIFLPAKTEEDIFAHLGLDYIPPWQRNA

SEQ ID NO: 131 - protein, 494 aa, Artificial Sequence
  Modified TdT Sequences
MLHIPIFPPIKKRQKLPESRNSCKYEVKFSEVAIFLVERKMGSSRRKFLTNLARSKGFRIEDVLSDAVTHVVAEDNSADELWQWLQNSSLGDLSKIEVLDISWFTECMGAGKPVEVEARHCLVKSCPVIDQYLEPSTVETVSQYACQRRTTMENHNQIFTDAFAILAENAEFNESEGPCLAFRRAASLLKSLPHPISSSKDLEGLPCLGDQTKAVIEDILEYGQCSKVQDVLCDDRYQTIKLFTSVFGVGLKTAEKWYRKGFHSLEEVQADNSIHFTKMQKAGFLYYDDISAAVCKAEADAIGQIVEETVRLIAPDAIVTLTGGFRRGKECGHDVDFLITTPEMGKEVWLLNRLINRLQNQGILLYYDIVESTFDKTRLPCRKFEAMDHFQKCFAIIKLKKELAAGRVQKDWKAIRVDFVACPVDNFAFALLGWTGSRQFERDLRRFARHERKMLLDNHALYDKTKKIFLPAKTEEDIFAHLGLDYIPPWQRNA

SEQ ID NO: 132 - protein, 494 aa, Artificial Sequence
  Modified TdT Sequences
MLHIPIFPPIKKRQKLPESRNSCKYEVKFSEVAIFLVERKMGSSRRKFLTNLARSKGFRIEDVLSDAVTHVVAEDNSADELWQWLQNSSLGDLSKIEVLDISWFTECMGAGKPVQVEARHCLVKSCPVIDQYLEPSTVETVSQYACQRRTTMENHNQIFTDAFAILAENAEFNESEGPCLAFRRAASLLKSLPHAISSSKDLEGLPCLGDQTSAVIEDILEYGQCSKVQDVLCDDRYQTIKLFTSVFGVGLKTAEKWYRKGFHSLEEVQADNAIHFTKMQKAGFLYYDDISAAVCKAEAQAIGQIVEETVRLIAPDAIVTLTGGFRRGKECGHDVDFLITSPEMGKEVWLLNRLINRLQNQGILLYYDIVESTFDKTRLPCRKFEAMDHFQKCFAIIKLKKELAAGRVQKDWKAIRVDFVVPPVDNFAFALLGWTGSRQFERDLRRFARHERKMLLDNHALYDKTKKIFLPAKTEEDIFAHLGLDYIPPWQRNA

SEQ ID NO: 133 - protein, 494 aa, Artificial Sequence
  Modified TdT Sequences
MLHIPIFPPIKKRQKLPESRNSCKYEVKFSEVAIFLVERKMGSSRRKFLTNLARSKGFRIEDVLSDAVTHIVAEDNSADELWQWLQNSSLGDLSKIEVLDISWFTECMGAGKPVQVEARHCLVKSCPVIDQYLEPSTVETVSQYACQRRTTMENHNQIFTDAFAILAENAEFNESEGPCLAFRRAASLLKSLPHAISSSKDLEGLPCLGDQTKAVIQDILEYGQCSKVQDVLCDDRYQTIKLFTSVFGVGLKTAEKWYRKGFHSLEEVQADNAIHFTKMQKAGFLYYDDISAAVCKAEADAIGQIVEETVRLIAPDAIVTLTGGFRRGKECGHDVDFLITTPEMGKEVWLLNRLINRLQNQGILLYYDIVESTFDKTRLPCRKFEAMDHFQKCFAIIKLKKELAAGRVQKDWKAIRVDFVACPVDNFAFALLGWTGSRQFERDLRRFARHERKMLLDNHALYDKTKKIFLPAKTEEDIFAHLGLDYIPPWQRNA

SEQ ID NO: 134 - protein, 494 aa, Artificial Sequence
  Modified TdT Sequences
MLHIPIFPPIKKRQKLPESRNSCKYEVKFSEVAIFLVERKMGSSRRKFLTNLARSKGFRIEDVLSDAVTHVVAEQNSADELWQWLQNSSLGDLSKIEVLDISWFTECMEAGKPVQIEARHCLVKSCPVIDQYLEPSTVETVSQYACQRRTTMENHNQIFTDAFAILAENAEFNESEGPCVAFRRAASLLKSLPHAISSSKDLEGLPCLGDQTKAVIEDILEYGQCSKVQDVLCDDRYQTIKLFTSVFGVGLKTAEKWYRKGFHSLEEVQADKAIHFTKMQKAGFLYYDDISAAVCKAEADAIGQIVEETVRLIAPDAIVTLTGGFRRGKECGHDVDFLITTPEMGKEVWLLNRLINRLQNQGILLYYDIVESTFDKTRLPCRKFEAMDHFQKCFAIIKLKKELAAGRVQKDWKAIRVDFVMPPVDNFAFALLGWTGSRQFERDLRRFARHERKMLLDNHALYDKTKKIFLPAKTEEDIFAHLGLDYIPPWQRNA

SEQ ID NO: 135 - protein, 494 aa, Artificial Sequence
  Modified TdT Sequences
MLHIPIFPPIKKRQKLPESRNSCKYEVKFSEVAIFLVERKMGSSRRKFLTNLARSKGFRIEDVLSDAVTHVVAEDNSADELWQWLQNSSLGDLSKIEVLDISWFTECMEAGKPVQVEARHCLVKSCPVIDQYLEPSTVETVSQYACQRRTTMENHNRIFTDAFAILAENAEFNESEGPCLAFRRAASLLKSLPHAISSSKDLEGLPCLGDQTKAVIEDILEYGQCSKVQDVLCDDRYQTIKLFTSVFGVGLKTAEKWYRKGFHSLEEVQADKAIHFTKMQKAGFLYYDDISAAVCKAEADAIGQIVEETVRLIAPDAIVTLTGGFRRGKECGHDVDFLITTPEMGKEVWLLNRLINRLQNKGILLYYDIVESTFDKTRLPCRKFEAMDHFQKCFAIIKLKKELAAGRVQKDWKAIRVDFVACPVDNFAFALLGWTGSRQFERDLRRFARHERKMLLDNHALYDKTKKIFLPAKTEEDIFAHLGLDYIPPWQRNA

SEQ ID NO: 136 - protein, 494 aa, Artificial Sequence
  Modified TdT Sequences
MLHIPIFPPIKKRQKLPESRNSCKYEVKFSEVAIFLVERKMGASRRKFLTNLARSKGFRIEDVLSDAVTHVVAEDNSADELWQWLQNSSLGDLSKIEVLDISWFTECMGAGKPVQVEARHCLVKSCPVIDQYLEPSTVETVSQYACQRRTTMENHNQIFTDAFAVLAENAEFNESEGPCLAFRRAASLLKSLPHAISSSKDLEGLPCLGDQTKAVIEDILEYGQCSKVQDVLCDDRYQTIKLFTSVFGVGLKTAEKWYRKGFHTLEEVQADNAIHFTKMQKAGFLYYDDISAAVCKAEAQAIGQIVEETVRLIAPDAIVTLTGGFRRGKECGHDVDFLITTPEMGKEVWLLNRLINRLQNQGILLYYDIVESTFDKTRLPCRKFEAMDHFQKCFAIIKLKKELAAGRVQKDWKAIRVDFVAPPVDNFAFALLGWTGSRQFERDLRRFARHERKMLLDNHALYDKTKKIFLPAKTEEDIFAHLGLDYIPPWQRNA

SEQ ID NO: 137 - protein, 494 aa, Artificial Sequence
  Modified TdT Sequences
MLHIPIFPPIKKRQKLPESRNSCKYEVKFSEVAIFLVERKMGSSRRKFLTNLARSKGFRIEDVLSDAVTHVVAEDNSADELWQWLQNSSLGDLSKIEVLDISWFTECMGAGKPVQIEARHCLVKSCPVIDQYLEPSTVETVSQYACQRRTTMENHNQIFTDAFAILAENAEFNESEGPCLAFRRAASLLKSLPHAISSSKDLEGLPCLGDQTKAVIEDILEYGQCSKVQDVLCDDRYQTIKLFTSVFGVGLKTAEKWYRKGFHSLEEVQADNAIHFTKMQKAGFLYYDDISAAVCKAEADAIGQIVEETVRLIAPDAIVTLTGGFRRGKECGHDVDFLITTPEMGKEVWLLNRLINRLQNQGILLYYDIVESTFDKTRLPCRKFEAMDHFQKCFAIIKLKKELAAGRVQKDWKAIRVDFVACPVDNFAFALLGWTGSRQFERDLRRWARHERKMILDNHALYDKTKKIFLPAKTEEDIFAHLGLDYIPPWQRNA

SEQ ID NO: 138 - protein, 494 aa, Artificial Sequence
  Modified TdT Sequences
MLHIPIFPPIKKRQKLPESRNSCKYEVKFSEVAIFLVERKMGSSRRKFLTNLARSKGFRIEDVLSDAVTHVVAEDNSADELWQWLQNSSLRDLSKIEVLDISWFTECMEAGKPVQVEARHCLVKRCPVIDQYLEPSTVETVSQYACQRRTTMENHNQIFTDAFAILAENAEFNESEGPCLAFRRAASLLKSLPHAISSSKDLEGLPCLGDQTKAVIEDILEYGQCSKVQDVLCDDRYQTIKLFTSVFGVGLKTAEKWYRKGFHSLEEVQADKAIHFTKMQKAGFLYYDDISAAVCKAEADAIGQIVEETVRLIAPDAIVTLTGGFRRGKNCGHDVDFLITTPEMGKEVWLLNRLINRLQNQGILLYYDIVESTFDKTRLPCRKFEAMDHFQKCFAIIKLKKELAAGRVQKDWKAIRVDFVMPPVDNFAFALLGWTGSRQFERDLRRFARHERKMLLDNHALYDKTKKIFLPAKTEEDIFAHLGLDYIPPWQRNA

SEQ ID NO: 139 - protein, 494 aa, Artificial Sequence
  Modified TdT Sequences
MLHIPIFPPIKKRQKLPESRNSCKYEVKFSEVAIFLVERKMGSSRRKFLTNLARSKGFRIEDVLSDAVTHVVAEDNSADELWQWLQNSSLGDLSKIEVLDISWFTECMEAGKPVQIEARHCLVKSCPVIDQYLEPSTVETVSQYACQRRTTMENHNQIFTDAFAILAENAEFNESEGPCLAFRRAASLLKSLPHAISSSKDLEGLPCLGDQSKAVIEDILEYGQCSKVQDVLCDDRYQTIKLFTSVFGVGLKTAEKWYRKGFHSLEEVQADKAIHFTKMQKAGFLYYDDISAAVCKAEADAIGQIVEETVRLIAPDAIVTLTGGFRRGKECGHDVDFLITTPEMGKEVWLLNRLINRLQNQGILLYYDIVESTFDKTRLPCRKFEAMDHFQKCFAIIKLKKELAAGRVQKDWKAIRVDFVMCPVDNFAFALLGWTGSRQFERDLRRFARHERKMLLDNHALYDKTKKIFLPAKTEEDIFAHLGLDYIPPWQRNA

SEQ ID NO: 140 - protein, 494 aa, Artificial Sequence
  Modified TdT Sequences
MLHIPIFPPIKKRQKLPESRNSCKYEVKFSEVAIFLVERKMGSSRRKFLTNLARSKGFRIEDVLSDAVTHVVAENNSADELWQWLQNSSLGDLSKIEVLDISWFTECMEAGKPVQVEARHCLVKSCPVIDQYLEPSTVETVSQYACQRRTTMENHNQIFTDAFAILAENAEFNESEGPCLAFRRAASLLKSLPHAISSSKDLEGLPCLGDQTKAVIEDILEYGQCSKVQDVLCDDRYQSIKLFTSVFGVGLKTAEKWYRKGFHSLEEVQADNAIHFTKMQKAGFLYYDDISAAVCKAEADAIGQIVEETVRLIAPDAIVTLTGGFRRGKECGHDVDFLITTPEMGKEVWLLNRLINRLQNQGILLYYDIVESTFDKTRLPCRKFEAMDHFQKCFAIIKLKKELAAGRVQKDWKAIRVDFVAPPVDNFAFALLGWTGSRQFERDLRRFARHERKMLLDNHALYDKTKKIFLPAKTEEDIFAHLGLDYIPPWQRNA

SEQ ID NO: 141 - protein, 494 aa, Artificial Sequence
  Modified TdT Sequences
MLHIPIFPPIKKRQKLPESRNSCKYEVKFSEVVIFLVERKMGSSRRKFLTNLARSKGFRIEDVLSDAVTHVVAEDNSADELWQWLQNSSLGDLSKIEVLDISWFTECMEAGKPVQVEARHCLVKSCPVIDQYLEPSTVETVSQYACQRRTTMENCNQIFTDAFAILAENAEFNESEGPCLAFRRAASLLKSLPHAISSSKDLEGLPCLGDQTKAVIEDILEYGQCSKVQDVLCDDRYQTIKLFTSVFGVGLKTAEKWYRKGFHSLEEVQADKAIHFTKMQKAGFLYYDDISAAVCKAEADAIGQIVEETVRLIAPDAIVTLTGGFRRGKECGHDVDFLITTPEMGKEVWLLNRLINRLQNQGILLYYDIVESTFDKTRLPCRKFEAMDHFQKCFAIIKLKKERAAGRVQKDWKAIRVDFVMPPVDNFAFALLGWTGSRQFERDLRRFARHERKMLLDNHALYDKTKKIFLPAKTEEDIFAHLGLDYIPPWQRNA

SEQ ID NO: 142 - protein, 494 aa, Artificial Sequence
  Modified TdT Sequences
MLHIPIFPPIKKRQKLPESRNSCKYEVKFSEVVIFLVERKMGSSRRKFLTNLARSKGFRIEDVLSDAVTHVVAEDNSADELWQWLQNSSLGDLSKIEVLDISWFTECMEAGKPVQVEARHCLVKSCPVIDQYLEPSTVETVSPYACQRRTTMENHNQIFTDAFAILAENAEFNESEGPCLAFRRAASLLKSLPHAISSSKDLEGLPCLGDQTKAVIEDILEYGQCSKVQDVLCDDRYQTIKLFTSVFGVGLKTAEKWYRKGFHSLEEVQADKAIHFTKMQKAGFLYYDDISAAVCKAEADAIGQIVEETVRLIAPDAIVTLTGGFRRGKECGHDVDFLITTPEMGKEVWLLNRLINRLQNQGILLYYDIVESTFDKTRLPCRKFEAMDHFQKCFAIIKLKKELAAGRVQKDWKAIRVDFVMCPVDNFAFALLGWTGSRQFERDLRRFARHERKMLLDNHALYDKTKKIFLPAKTEEDIFAHLGLDYIPPWQRNA

SEQ ID NO: 143 - protein, 494 aa, Artificial Sequence
  Modified TdT Sequences
MLHIPIFPPIKKRQKLPESRNSCKYEVKFSEVAIFLVERKMGSSRRKFLTNLARSKGFRIEDVLSDAVTHVVAEDNSADELWQWLQNSSLGDLSKIEVLDISWFTECMGAGKPVQSEARHCLVKSCPVIDQYLEPSTVETVSQYACQRRTTMENHNQIFTDAFAILAENAEFNESEGPCLAFRRAASLLKSLPHAISSSKDLEGLPCLGDQTKAVIEDILEYGQCSKVQDVLCDDRYQTIKLFTSVFGVGLKTAEKWYRKGFHSLEEVQADNAIHFTKMQKAGFLYYDDISAAVCKAEADAIGQIVEEAVRLIAPDAIVTLTGGFRRGKECGHDVDFLITTPEMGKEVWLLNRLINRLQNQGILLYYDIVESTFDKTRLPCRKFEAMDHFQKCFAIIKLKKELAAGRVQKDWKAIRVDFVACPVDNFAFALLGWTGSRQFERDLRRFARHERKMLLDNHALYDKTKKIFLPAKTEEDIFAHLGLDYIPPWQRNA

SEQ ID NO: 144 - protein, 494 aa, Artificial Sequence
  Modified TdT Sequences
MLHIPIFPPIKKRQKLPESRNSCKYEVKFSEVAIFLVERKMGSSRRKFLTNLARSKGFRIEDVLSDAVTHVVAEQNSADELWQWLQNSSLGDLSKIEVLDISWFTECMEAGKPVQVEARHCLVKSCPVIDQYLEPSTVETVSQYACQRRTTMENHNRIFTDAFAILAENAEFNESEGPCLAFRRAASLLKSLPHAISSSKDLEGLPCLGDQTKAVIEDILEYGQCSKVQDVLCDDRYQTIKLFTSVFGVGLKTAEKWYRKGFHSLEEVQADNAIHFTKMQKAGFLYYDDISAAVCKAEADAIGQIVEETVRLIAPDAIVTLTGGFRRGKECGHDVDFLITTPEMGKEVWLLNRLINRLQNQGILLYYDIVESTFDKTRLPCRKFEAMDHFQKCFAIIKLKKELAAGRVQKDWKAIRVDFVMPPVDNFAFALLGWTGSRQFERDLRRFARHERKMLLDNHALYDKTKKIFLPAKTEEDIFAHLGLDYIPPWQRNA

SEQ ID NO: 145 - protein, 494 aa, Artificial Sequence
  Modified TdT Sequences
MLHIPIFPPIKKRQKLPESRNSCKYEVKFSEVAIFLVERKMGSSRRKFLTNLARSKGFRIEDVLSDAVTHVVAEDNSADELWQWLQNSSLGDLSKIEVLDISWFTECMEAGKPVQVEARHCLVKSCPVIDQYLEPSAVETVSPYACQRRTTMENHNQIFTDAFAILAENAEFNESEGPCLAFRRAASLLKSLPHAISSSKDLEGLPCLGDQTKAVIEDILEYGQCSKVQDVLCDDRYQTIKLFTSVFGVGLKTAEKWYRKGFHSLEEVQADKAIHFTKMQKAGFLYYDDISAAVCKAEADAIGQIVEETVRLIAPDAIVTLTGGFRRGKECGHDVDFLITTPEMGKEVWLLNRLINRLQNQGILLYYDIVESTFDKTRLPCRKFEAMDHFQKCFAIIKLKKELAAGRVQKDWKAIRVDFVMCPVDNFAFALLGWTGSRQFERDLRRFARHERKMLLDNHALYDKTKKIFLPAKTEEDIFAHLGLDYIPPWQRNA

SEQ ID NO: 146 - protein, 494 aa, Artificial Sequence
  Modified TdT Sequences
MLHIPIFPPIKKRQKLPESRNSCKYEVKFSEVAIFLVERKMGSSRRKFLTNLARSKGFRIEDVLSDAVTHVVAENNSADELWQWLQNSSLGDLSKIEVLDISWFTECMGAGKPVQVEARHCLVKSCPVIDQYLEPSTVETVSQYACQRRTTMENHNQIFTDAFAILAENAEFNESEGPCLAFRRAASLLKSLPHPISSSKDLEGLPCLGDQTKAVIEDILEYGQCSKVQDVLCDDRYQTIKLFTSVFGVGLKTAEKWYRKGFHSLEEVKADNAIHFTKMQKAGFLYYDDISAAVCKAEADAIGQIVEETVRLIAPDAIVTLTGGFRRGKECGHDVDFLITTPEMGKEVWLLNRLINRLQNQGILLYYDIVESTFDKTRLPCRKFEAMDHFQKCFAIIKLKKELAAGRVQKDWKAIRVDFVAPPVDNFAFALLGWTGSRQFERDLRRFARHERKMLLDNHALYDKTKKIFLPAKTEEDIFAHLGLDYIPPWQRNA

SEQ ID NO: 147 - protein, 494 aa, Artificial Sequence
  Modified TdT Sequences
MLHIPIFPPIKKRQKLPESRNSCKYEVKFSEVAIFLVERKMGSSRRKFLTNLARSKGFRIEDVLSDAVTHVVAEDNSADELWQWLQNSSLGDLSKIEVLDISWFTECMGAGRPVQVEARHCLVKSCPVIDQYLEPSTVETVSQYACQRRTTMENHNQIFTDAFAILAENAEFNESEGPCLAFRRAASLLKSLPHAISSSKDLEGLPCLGDQTSAVIEDILEYGQCSKVQDVLCDDRYQTIKLFTSVFGVGLKTAEKWYRKGFHSLEEVQADNAIHFTKMQKAGFLYYDDISAAVCKAEADAIGQIVEETVRLIAPDAIVTLTGGFRRGKECGHDVDFLITTPQMGKEVWLLNRLINRLQNQGILLYYDIVESTFDKTRLPCRKFEAMDHFQKCFAIIKLKKELAAGRVQKDWKAIRVDFVAPPVDNFAFALLGWTGSRQFERDLRRFARHERKMLLDNHALYDKTKKIFLPAKTEEDIFAHLGLDYIPPWQRNA

SEQ ID NO: 148 - protein, 494 aa, Artificial Sequence
  Modified TdT Sequences
MLHIPIFPPIKKRQKLPESRNSCKYEVKFSEVAIFLVERKMGSSRRKFLTNLARSKGFRIEDVLSDAVTHVVAEDNSADELWQWLQNSSLGDLSKIEVLDISWFTECMEAGKPVQVEARHCLVKSCPVIDQYLEPSTVETVSQYACQRRTTMENHNQIFTDAFAILAENAEFNESEGPCLAFRRAASLLKSLPHAISSSKDLEGLPCLGDQTKAVIEDILEYGQCSKVQDVLCDDRYQTIKLFTSVFGVGLKTAEKWYRKGFHSLEEVKADNAIHFTKMQKAGFLYYDDISAAVCKAEADAIGQIVEETVRLIAPDAIVTLTGGFRRGKECGHDVDFLITTPEMGKEVWLLNRLINRLQNQGILLYYDIVESTFDKTRLPCRKFEAMDHFQKCFAIIKLKKELAAGRVQKDWKAIRVDFVAAPVDNFAFALLGWTGSRQFERDLRRFARHERKMLLDNHALYDKTKKIFLPAKTEEDIFAHLGLDYIPPWQRNA

SEQ ID NO: 149 - protein, 494 aa, Artificial Sequence
  Modified TdT Sequences
MLHIPIFPPIKKRQKLPESRNSCKYEVKFSEVAIFLVERKMGSSRRKFLTNLARSKGFRIEDVLSDAVTHVVAEDNSADELWQWLQNSSLGDLSKIEVLDISWFTECMGAGKPVQVEARHCLVKSCPVIDQYLEPSTVETVSQYACQRRTTMENHNQIFTDAFAILAENAEFNESEGPCLAFRRAASLLKSLPHAISSSKDLEGLPCLGDQTKAVIEDILEYGQCSKVQDVLCDDRYQTIKLFTSVFGVGLKTAEKWYRKGLHSLEEVQADNAIHFTKMQRAGFLYYDDISAAVCKAEADAIGQIVEETVRLIAPDAIVTLTGGFRRGKECGHDVDFLITTPEMGKEVWLLNRLINRLQNQGILLYYDIVESTFDKTRLPCRKFEAMDHFQKCFAIIKLKKELAAGRVQKDWKAIRVDFVACPVDNFAFALLGWTGSRQFERDLRRFARHERKMLLDNHALYDKTKKIFLPAKTEEDIFAHLGLDYIPPWQRNA

SEQ ID NO: 150 - protein, 494 aa, Artificial Sequence
  Modified TdT Sequences
MLHIPIFPPIKKRQKLPESRNSCKYEVKFSEVAIFLVERKMGSSRRKFLTNLARSKGFRIEDVLSDAITHVVAEDNSADELWQWLQNSSLGDLSKIEVLDISWFTECMEAGKPVQVEARHCLVKSCPVIDQYLEPSTVETVSQYACQRRTTMENHNQIFTDAFAILAENAEFNESEGPCLAFRRAASLLKSLPHAISSSKDLEGLPCLGDQTKAVIEDILEYGQCSKVQDVLCDDRYQTIKLFTSVFGVGLKTAEKWYRKGFHSLEEVQADKAIHFTKMQKAGFLYYDDISAAVCRAEADAIGQIVEETVRLIAPDAIVTLTGGFRRGKECGHDVDFLITTPEMGKEVWLLNRLINRLQNQGILLYYDIVESTFDKTRLPCRKFEAMDHFQKCFAIIKLKKELAAGRVQKDWKAIRVDFVMCPVDNFAFALLGWTGSRQFERDLRRFARHERKMLLDNHALYDKTKKIFLPAKTEEDIFAHLGLDYIPPWQRNA

SEQ ID NO: 151 - protein, 494 aa, Artificial Sequence
  Modified TdT Sequences
MLHIPIFPPIKKRQKLPESRNSCKYEVKFSEVAIFLVERKMGSSRRKFLTNLARSKGFRIEDVLSDAVTHVVAEDNSADELWQWLQNSSLGDLSKIEVLDISWFTECMGAGKPVQVEARHCLVKSCPVIDQYLEPSTVETVSQYACQRRTTMENHNQIFTDAFAILAENAEFNESEGPCLAFRRAASLLKSLPHAISSSKDLEGLPCLGDQTKAVIEDILEYGQCSKVQDVLCDDRYQTIKLFTSVFGVGLKTAEKWYRKGFHSLEEVQADNAIHFTKMQKAGFLYYDDISAAVCKAEADAIGQIVEETVRLIAPDAIVTLTGGFRRGKECGHDVDFLITSPEMGKEVWLLNRLINRLQNQGILLYYDIVESTFDKTRLPCRKFEAMDHFQKCFAIIKLKKELAAGRVQKDWKAIRVDFVACPVDNFAFALLGWTGSRQFERDLRRFARHEKKMLLDNHALYDKTKKIFLPAKTEEDIFAHLGLDYIPPWQRNA

SEQ ID NO: 152 - protein, 494 aa, Artificial Sequence
  Modified TdT Sequences
MLHIPIFPPIKKRQKLPESRNSCKYEVKFSEVAIFLVERKMGSSRRKFLTNLARSKGFRIEDVLSDAVTHIVAEDNSADELWQWLQNSSLGDLSKIEVLDISWFTECMGAGKPVQVEARHCLVKSCPVIDQYLEPSTVETVSQYACQRRTTMENHNQIFTDAFAILAENAEFNESEGPCLAFMRAASLLKSLPHAISSSKDLEGLPCLGDQTKAVIEDILEYGQCSKVQDVLCDDRYQTIKLFTSVFGVGLKTAEKWYRKGFHSLEEVQADNAIHFTKMQKAGFLYYDDISAAVCKAEADAIGQIVEETVRLIAPDAIVTLTGGFRRGKECGHDVDFLITTPEMGKEVWLLNRLINRLQNQGILLYYDIVESTFDKTRLPCRKFEAMDHFQKCFAIIKLKKELAAGRVQKDWKAIRVDFVMPPVDNFAFALLGWTGSRQFERDLRRFARHERKMLLDNHALYDKTKKIFLPAKTEEDIFAHLGLDYIPPWQRNA

SEQ ID NO: 153 - protein, 494 aa, Artificial Sequence
  Modified TdT Sequences
MLHIPIFPPIKKRQKLPESRNSCKYEVKFSEVAIFLVERKMGASRRKFLTNLARSKGFRIEDVLSDAVTHVVAEDNSADELWQWLQNSSLGDLSKIEVLDISWFTECMGAGKPVQVEARHCLVKSCPVIDQYLEPSTVETVSQYACQRRTTMENHNQIFTDAFAILAENAEFNESEGPCLAFRRAASLLKSLPHAISSSKDLEGLPCLGDQTKAVIQDILEYGQCSKVQDVLCDDRYQTIKLFTSVFGVGLKTAEKWYRKGFHSLEEVQADNAIHFTKMQKAGFLYYDDISAAVCKAEADAIGQIVEETVRLIAPDAIVTLTGGFRRGKECGHDVDFLITTPEMGKEVWLLNRLINRLQNQGILLYYDIVESTFDKTRLPCRKFEAMDAFQKCFAIIKLKKELAAGRVQKDWKAIRVDFVAPPVDNFAFALLGWTGSRQFERDLRRFARHERKMLLDNHALYDKTKKIFLPAKTEEDIFAHLGLDYIPPWQRNA

SEQ ID NO: 154 - protein, 494 aa, Artificial Sequence
  Modified TdT Sequences
MLHIPIFPPIKKRQKLPESRNSCKYEVKFSEVAIFLVERKMGSSRRKFLTNLARSKGFRIEDVLSDAVTHVVAEDNSADELWQWLQNSSLGDLSKIEVLDISWFTECMGAGKPVQVEARHCLVKSCPVIDQYLEPSTVETVSQYACQRRTTMENHNQIFTDAFAILAENAEFNESEGPCLAFRRAASLLKSLPHPISSSKDLEGLPCLGDQTKAVIEDILEYGQCSKVQDVLCDDRYQTIKLFTSVFGVGLKTAEKWYRKGFHSLEEVQADNAIHFTKMQKAGFLYYDDISAAVCKAEADAIGQIVEETVRLIAPDAIVTLTGGFRRGKECGHDVDFLITTPEMGKEVWLLNRLINRLQNQGILLYYDIVESTFDKTRLPCRKFEAMDAFQKCFAIIKLKKELAAGRVQKDWKAIRVDFVAPPVDNFAFALLGWTGSRQFERDLRRFARHERKMLLDNHALYDKTKKIFLPAKTEEDIFAHLGLDYIDPWQRNA

SEQ ID NO: 155 - protein, 494 aa, Artificial Sequence
  Modified TdT Sequences
MLHIPIFPPIKKRQKLPESRNSCKYEVKFSEVAIFLVERKMGSSRRKFLTNLARSKGFRIEDVLSDAVTHVVAEDNSADELWQWLQNSSLGDLSKIEVLDISWFTECMEAGKPVQVEARHCLVKSCPVIDQYLEPSTVETVSQYACQRRTTMENHNQIFTDAFAILAENAEFNESEGPCLAFRRAASLLKSLPHAISSSRDLEGLPCLGDQTKAVIEDILEYGQCSKVQDVLCDDRYQTIKLFTSVFGVGLKTAEKWYRKGFHSLEEVQADKAIHFTKMQRAGFLYYDDISAAVCKAEADAIGQIVEETVRLIAPDAIVTLTGGFRRGKECGHDVDFLITTPEMGKEVWLLNRLINRLQNQGILLYYDIVESTFDKTRLPCRKFEAMDHFQKCFAIIKLKKELAAGRVQKDWKAIRVDFVMCPVDNFAFALLGWTGSRQFERDLRRFARHERKMLLDNHALYDKTKKIFLPAKTEEDIFAHLGLDYIPPWQRNA

SEQ ID NO: 156 - protein, 494 aa, Artificial Sequence
  Modified TdT Sequences
MLHIPIFPPIKKRQKLPESRNSCKYEVKFSEVAIFLVERKMGSSRRKFLTNLARSKGFRIEDVLSDAVTHIVAEDNSADELWQWLQNSSLGDLSKIEVLDISWFTECMGAGKPVQVEARHCLVKSCPVIDQYLEPSTVETVSQYACQRRTTMENHNQIFTDAFAILAENAEFNESEGPCLAFRRAASLLKSLPHAISSSKDLEGLPCLGDQTKAVIEDILEYGQCSKVQDVLCDDRYQSIKLFTSVFGVGLKTAEKWYRKGFHSLEEVQADNAIHFTKMQKAGFLYYDDISAAVCKAEADAIGQIVEETVRLIAPDAIVTLTGGFRRGKECGHDVDFLITTPQMGKEVWLLNRLINRLQNQGILLYYDIVESTFDKTRLPCRKFEAMDHFQKCFAIIKLKKELAAGRVQKDWKAIRVDFVAPPVDNFAFALLGWTGSRQFERDLRRFARHERKMLLDNHALYDKTKKIFLPAKTEEDIFAHLGLDYIPPWQRNA

SEQ ID NO: 157 - protein, 494 aa, Artificial Sequence
  Modified TdT Sequences
MLHIPIFPPIKKRQKLPESRNSCKYEVKFSEVAIFLVERKMGASRRKFLTNLARSKGFRIEDVLSDAVTHIVAEDNSADELWQWLQNSSLGDLSKIEVLDISWFTECMGAGKPVQVEARHCLVKSCPVIDQYLEPSTVETVSQYACQRRTTMENHNQIFTDAFAILAENAEFNESEGPCLAFRRAASLLKSLPHAISSSKDLEGLPCLGDQTKAVIEDILEYGQCSKVQDVLCDDRYQTIKLFTSVFGVGLKTAEKWYRKGFHSLEEVQADNAIHFTKMQKAGFLYYDDISAAVCKAEADAIGQIVEEAVRLIAPDAIVTLTGGFRRGKECGHDVDFLITTPEMGKEVWLLNRLINRLQNQGILLYCDIVESTFDKTRLPCRKFEAMDHFQKCFAIIKLKKELAAGRVQKDWKAIRVDFVAPPVDNFAFALLGWTGSRQFERDLRRFARHERKMLLDNHALYDKTKKIFLPAKTEEDIFAHLGLDYIPPWQRNA

SEQ ID NO: 158 - protein, 494 aa, Artificial Sequence
  Modified TdT Sequences
MLHIPIFPPIKKRQKLPESRNSCKYEVKFSEVAIFLVERKMGSSRRAFLTNLARSKGFRIEDVLSDAVTHVVAEDNSADELWQWLQNSSLGDLSKIEVLDISWFTECMGAGKPVQVEARHCLVKSCPVIDQYLEPSTVETVSQYACQRRTTMENHNKIFTDAFAILAENAEFNESEGPCLAFRRAASLLKSLPHAISSSKDLEGLPCLGDQTKRVIEDILEYGQCSKVQDVLCDDRYQTIKLFTSVFGVGLKTAEKWYRKGFHSLEEVQADNAIHFTKMQKAGFLYYDDISAAVCKAEADAIGQIVEETVRLIAPDAIVTLTGGFRRGKECGHDVDFLITTPEMGKEVWLLNRLINRLQNQGILLYYDIVESTFDKTRLPCRKFEAMDHFQKCFAIIKLKKELAAGRVQKDWKAIRVDFVAPPYDNFAFALLGWTGSRQFERDLRRFARHERKMLLDNHALYDKTKKIFLPAKTEEDIFAHLGLDYIPPWQRNA

SEQ ID NO: 159 - protein, 494 aa, Artificial Sequence
  Modified TdT Sequences
MLHIPIFPPIKKRQKLPESRNSCKYEVKFSEVAIFLVERKMGSSRRKFLTNLARSKGFRIEDVLSDAVTHVVAEDNSADELWQWLQNSSLGDLSKIEVLDISWFTECMEAGKPVQVEARHCLVKSCPVIDQYLEPSTVETVSQYACQRRTTMENHNQIFTDAFAILAENAEFNESEGPCVAFRRAASLLKSLPHAISSSKDLEGLPCLGDQTKAVIEDILEYGQCSKVQDVLCDDRYQTIKLFTSVFGVGLKTAEKWYRKGFHSLEEVQADKAIHFTKMQKAGFLYYDDISAAVCKAEADAIGQIVEETVRLIAPDAIVTLTGGFRRGKNCGHDVDFLITTPEMGKEVWLLNRLINRLQNQGILLYYDIVESTFDKTRLPCRKFEAMDHFQKCFAIIKLKKELAAGRVQKDWKAIRVDFVMAPVDNFAFALLGWTGSRQFERDLRRFARHERKMLLDNHALYDKTKKIFLPAKTEEDIFAHLGLDYIPPWQRNA

SEQ ID NO: 160 - protein, 494 aa, Artificial Sequence
  Modified TdT Sequences
MLHIPIFPPIKKRQKLPESRNSCKYEVKFSEVAIFLVERKMGSSRRKFLTNLARSKGFRIEDVLSDAVTHVVAEDNSADELWQWLQNSSLGDLSKIAVLDISWFTECMGAGKPVQIEARHCLVKSCPVIDQYLEPSTVETVSQYACQRRTTMENHNQIFTDAFAILAENAEFNESEGPCLAFRRAASLLKSLPHAISSSKDLEGLPCLGDQSKAVIEDILEYGQCSKVQDVLCDDRYQTIKLFTSVFGVGLKTAEKWYRKGFHSLEEVQADNAIHFTKMQKAGFLYYDDISAAVCKAEADAIGQIVEETVRLIAPDAIVTLTGGFRRGKECGHDVDFLITTPEMGKEVWLLNRLINRLQNQGILLYYDIVESTFDKTRLPCRKFEAMDHFQKCFAIIKLKKELAAGRVQKDWKAIRVDFVAPPVDNFAFALLGWTGSRQFERDLRRFARHERKMLLDNHALYDKTKKIFLPAKTEEDIFAHLGLDYIPPWQRNA

SEQ ID NO: 161 - protein, 494 aa, Artificial Sequence
  Modified TdT Sequences
MLHIPIFPPIKKRQKLPESRNSCKYEVKFSEVAIFLVERKMGSSRRKFLTNLARSKGFRIEDVLSDAVTHVVAEDNSADELWQWLQNSSLGDLSKIEVLDISWFTECMEAGKPVQVEARHCLVKRCPVIDQYLEPSTVETVSQYACQRRTTMENHNQIFTDAFAILAENAEFNESEGPCLAFRRAASLLKSLPHAISSSKDLEGLPCLGDQTKAVIEDILEYGQCSKVQDVLCDDRYQTIKLFTSVFGVGLKTAEKWYRKGFHSLEEVQADNAIHFTKMQKAGFLYYDDISAAVCKAEAQAIGQIVEETVRLIAPDAIVTLTGGFRRGKECGHDVDFLITTPEMGKEVWLLNRLINRLQNQGILLYYDIVESTFDKTRLPCRKFEAMDHFQKCFAIIKLKKELAAGRVQKDWKAIRVDFVMPPVDNFAFALLGWTGSRQFERDLRRFARHERKMLLDNHALYDKTKKIFLPAKTEEDIFAHLGLDYIPPWQRNA

SEQ ID NO: 162 - protein, 494 aa, Artificial Sequence
  Modified TdT Sequences
MLHIPIFPPIKKRQKLPESRNSCKYEVKFSEVAIFLVERKMGSSRRKFLTNLARSKGFRIEDVLSDAVTHIVAEDNSADELWQWLQNSSLGDLSKIAVLDISWFTECMGAGKPVQVEARHCLVKSCPVIDQYLEPSTVETVSQYACQRRTTMENHNQIFTDAFAILAENAEFNESEGPCLAFRRAASLLKSLPHAISSSKDLEGLPCLGDQTKAVIEDILEYGQCSKVQDVLCDDRYQTIKLFTSVFGVGLKTAEKWYRKGFHSLEEVQADNAIHFTKMQKAGFLYYDDISAAVCKAEAQAIGQIVEETVRLIAPDAIVTLTGGFRRGKECGHDVDFLITTPEMGKEVWLLNRLINRLQNQGILLYYDIVESTFDKTRLPCRKFEAMDHFQKCFAIIKLKKELAAGRVQKDWKAIRVDFVAPPVDNFAFALLGWTGSRQFERDLRRFARHERKMLLDNHALYDKTKKIFLPAKTEEDIFAHLGLDYIDPWQRNA

SEQ ID NO: 163 - protein, 494 aa, Artificial Sequence
  Modified TdT Sequences
MLHIPIFPPIKKRQKLPESRNSCKYEVKFSEVAIFLVERKMGSSRRKFLTNLARSKGFRIEDVLSDAVTHVVAEDNSADELWQWLQNSSLGDLSKIEVLDISWFTECMEAGKPVQVEARHCLVKSCPVIDQYLEPSTVETVSQYACQRRTTMENHNQIFTDAFAILAENAEFNESEGPCLAFRRAASLLKSLPHAISSSRDLEGLPCLGDQTKAVIEDILEYGQCSKVQDVLCDDRYQTIKLFTSVFGVGLKTAEKWYRKGFHSLEEVQADKAIHFTKMQKAGFLYYDDISAAVCKAEADAIGQIVEETVRLIAPDAIVTLTGGFRRGKECGHDVDFLITTPEMGKEVWLLNRLINRLQNQGILLYYDIVESTFDKTRLPCRKFEAMDHFQKCFAIIKLKKELAAGRVQKDWKAIRVDFVMAPVDNFAFALLGWTGSKQFERDLRRFARHERKMLLDNHALYDKTKKIFLPAKTEEDIFAHLGLDYIPPWQRNA

SEQ ID NO: 164 - protein, 494 aa, Artificial Sequence
  Modified TdT Sequences
MLHIPIFPPIKKRQKLPESRNSCKYEVKFSEVAIFLVERKMGSSRRAFLTNLARSKGFRIEDVLSDAVTHVVAEDNSADELWQWLQNSSLGDLSKIEVLDISWFTECMGAGKPVEVEARHCLVKSCPVIDQYLEPSTVETVSQYACQRRTTMENHNQIFTDAFAILAENAEFNESEGPCLAFRRAASLLKSLPHAISSSKDLEGLPCLGDQTKAVIEDILEYGQCSKVQDVLCDDRYQTIKLFTSVFGVGLKTAEKWYRKGFHSLEEVKADKAIHFTKMQKAGFLYYDDISAAVCKAEADAIGQIVEETVRLIAPDAIVTLTGGFRRGKECGHDVDFLITTPEMGKEVWLLNRLINRLQNQGILLYYDIVESTFDKTRLPCRKFEAMDHFQKCFAIIKLKKELAAGRVQKDWKAIRVDFVAPPVDNFAFALLGWTGSRQFERDLRRFARHERKMLLDNHALYDKTKKIFLPAKTEEDIFAHLGLDYIPPWQRNA

SEQ ID NO: 165 - protein, 494 aa, Artificial Sequence
  Modified TdT Sequences
MLHIPIFPPIKKRQKLPESRNSCKYEVKFSEVAIFLVERKMGSSRRKFLTNLARSKGFRIEDVLSDAVTHVVAEDNSADELWQWLQNSSLGDLSKIEVLDISWFTECMEAGKPVQVEARHCLVKSCPVIDQYLEPSTVETVSQYACQRRTTMENHNQIFTDAFAILAENAEFNESEGPCLAFRRAASLLKSLPHAISSSKDLEGLPCLGDQSKAVIEDILEYGQCSKVQDVLCDDRYQTIKLFTSVFGVGLKTAEKWYRKGFHTLEEVQADNAIHFTKMQKAGFLYYDDISAAVCKAEADAIGQIVEETVRLIAPDAIVTLTGGFRRGKECGHDVDFLITTPEMGKEVWLLNRLINRLQNQGILLYYDIVESTFDKTRLPCRKFEAMDHFQKCFAIIKLKKELAAGRVQKDWKAIRVDFVAPPVDNFAFALLGWTGSRQFERDLRRFARHERKMLLDNHALYDKTKKIFLPAKTEEDIFAHLGLDYIPPWQRNA

SEQ ID NO: 166 - protein, 494 aa, Artificial Sequence
  Modified TdT Sequences
MLHIPIFPPIKKRQKLPESRNSCKYEVKFSEVAIFLVERKMGSSRRKFLTNLARSKGFRIEDVLSDAVTHVVAEDNSADELWQWLQNSSLGDLSKIEVLDISWFTECMGAGKPVQVEARHCLVKSCPVIDQYLEPSTVETVSQYACQRRTTMENHNKIFTDAFAILAENAEFNESEGPCLAFRRAASLLKSLPHAISSSKDLEGLPCLGDQTKAVIEDILEYGQCSKVQDVLCDDRYQTIKLFTSVFGVGLKTAEKWYRKGFHSLEEVKADNAIHFTKMQKAGFLYYDDISAAVCKAEADAIGQIVEEAVRLIAPDAIVTLTGGFRRGKECGHDVDFLITTPEMGKEVWLLNRLINRLQNQGILLYYDIVESTFDKTRLPCRKFEAMDHFQKCFAIIKLKKELAAGRVQKDWKAIRVDFVAPPVDNFAFALLGWTGSRQFERDLRRFARHERKMLLDNHALYDKTKKIFLPAKTEEDIFAHLGLDYIPPWQRNA

SEQ ID NO: 167 - protein, 494 aa, Artificial Sequence
  Modified TdT Sequences
MLHIPIFPPIKKRQKLPESRNSCKYEVKFSEVAIFLVERKMGSSRRKFLTNLGRSKGFRIEDVLSDAVTHVVAEDNSADELWQWLQNSSLGDLSKIEVLDISWFTECMGAGKPVQVEARHCLVKSCPVIDQYLEPSTVETVSQYACQRRTTMENHNQIFTDAFAILAENAEFNESEGPCLAFRRAASLLKSLPHAISSSKDLEGLPCLGDQSKAVIEDILEYGQCSKVQDVLCDDRYQTIKLFTSVFGVGLKTAEKWYRKGFHSLEEVQADNAIHFTKMQKAGFLYYDDINAAVCKAEADAIGQIVEETVRLIAPDAIVTLTGGFRRGKECGHDVDFLITTPEMGKEVWLLNRLINRLQNQGILLYYDIVESTFDKTRLPCRKFEAMDHFQKCFAIIKLKKELAAGRVQKDWKAIRVDFVAPPVDNFAFALLGWTGSRQFERDLRRFARHERKMLLDNHALYDKTKKIFLPAKTEEDIFAHLGLDYIPPWQRNA

SEQ ID NO: 168 - protein, 494 aa, Artificial Sequence
  Modified TdT Sequences
MLHIPIFPPIKKRQKLPESRNSCKYEVKFSEVAIFLVERKMGSSRRKFLTNLARSKGFRIENVLSDAVTHVVAEDNSADELWQWLQNSSLGDLSKIEVLDISWFTECMEAGKPVQVEARHCLVKSCPVIDQYLEPSAVETVSQYACQRRTTMENHNQIFTDAFAILAENAEFNESEGPCLAFRRAASLLKSLPHAISSSKDLEGLPCLGDQTKAVIEDILEYGQCSKVQDVLCDDRYQTIKLFTSVFGVGLKTAEKWYRKGFHSLEEVQADKAIHFTKMQKAGFLYYDDISAAVCKAEADAIGQIVEETVRLIAPDAIVTLTGGFRRGKECGHDVDFLITTPEMGKEVWLLNRLINRLQNQGILLYYDIVESTFDKTRLPCRKFEAMDHFQKCFAIIKLKKELAAGRVQKDWKAIRVDFVACPVDNFAFALLGWTGSRQFERDLRRFARHERKMLLDNHALYDKTKKIFLPAKTEEDIFAHLGLDYIPPWQRNA

SEQ ID NO: 169 - protein, 494 aa, Artificial Sequence
  Modified TdT Sequences
MLHIPIFPPIKKRQKLPESRNSCKYEVKFREVAIFLVERKMGSSRRKFLTNLARSKGFRIEDVLSDAVTHVVAEQNSADELWQWLQNSSLGDLSKIEVLDISWFTECMGAGKPVEVEARHCLVKSCPVIDQYLEPSTVETVSQYACQRRTTMENHNQIFTDAFAILAENAEFNESEGPCLAFRRAASLLKSLPHAISSSKDLEGLPCLGDQTKAVIEDILEYGQCSKVQDVLCDDRYQTIKLFTSVFGVGLKTAEKWYRKGFHSLEEVQADNAIHFTKMQKAGFLYYDDISAAVCKAEADAIGQIVEEAVRLIAPDAIVTLTGGFRRGKECGHDVDFLITTPEMGKEVWLLNRLINRLQNQGILLYYDIVESTFDKTRLPCRKFEAMDHFQKCFAIIKLKKELAAGRVQKDWKAIRVDFVAPPVDNFAFALLGWTGSRQFERDLRRFARHERKMLLDNHALYDKTKKIFLPAKTEEDIFAHLGLDYIPPWQRNA

SEQ ID NO: 170 - protein, 494 aa, Artificial Sequence
  Modified TdT Sequences
MLHIPIFPPIKKRQKLPESRNSCKYEVKFSEVAIFLVERKMGSSRRKFLTNLARSKGFRIEDVLSDAVTHVVAEDNSADELWQWLQNSSLGDLSKIEVLDISWFTECMGAGRPVQVEARHCLVKSCPVIDQYLEPSTVETVSQYACQRRTTMENHNKIFTDAFAILAENAEFNESEGPCLAFRRAASLLKSLPHAISSSKDLEGLPCLGDQTKAVIEDILEYGQCSKVQDVLCDDRYQTIKLFTSVFGVGLKTAEKWYRKGFHSLEEVQADNAIHFTKMQKAGFLYYDDISAAVCKAEADAIGQIVEETVRLIAPDAIVTLTGGFRRGKECGHDVDFLITTPEMGKEVWLLNRLINRLQNQGILLYYDIVESTFDKTRLPCRKFEAMDHFQKCFAIIKLKKELAAGRVQKDWKAIRVDFVACPVDNFAFALLGWTGSRQFERDLRRFARHERKMLLDNHALYDKTKKIFLPAKTEEDIFAHLGLDYIPPWQRNA

SEQ ID NO: 171 - protein, 494 aa, Artificial Sequence
  Modified TdT Sequences
MLHIPIFPPIKKRQKLPESRNSCKYEVKFSEVAIFLVERKMGSSRRKFLTNLARSKGFRIEDVLSDAVTHVVAEDNSADELWQWLQNSSLGDLSKIEVLDISWFTECMEAGKPVQIEARHCLVKSCPVIDQYLEPSTVETVSQYACQRRTTMENHNQIFTDAFAILAENAEFNESEGPCLEFRRAASLLKSLPHAISSSKDLEGLPCLGDQTKAVIEDILEYGQCSKVQDVLCDDRYQTIKLFTSVFGVGLKTAEKWYRKGFHSLEEVQADKAIHFTKMQKAGFLYYDDISAAVCKAEADAIGQIVEETVRLIAPDAIVTLTGGFRRGKECGHDVDFLITTPEMGKEVWLLNRLINRLQNQGILLYYDIVESTFDKTRLPCRKFEAMDHFQKCFAIIKLKKELAAGRVQKDWKAIRVDFVACPVDNFAFALLGWTGSRQFERDLRRFARHERKMLLDNHALYDKTKKIFLPAKTEEDIFAHLGLDYIPPWQRNA

SEQ ID NO: 172 - protein, 494 aa, Artificial Sequence
  Modified TdT Sequences
MLHIPIFPPIKKRQKLPESRNSCKYEVKFSEVAIFLVERKMGSSRRKFLTNLARSKGFRIEDVLSDAVTHVVAEDNSADELWQWLQNSSLGDLSKIEVLDISWFTECMGAGKPVQVEARHCLVKSCPVIDQYLEPSTVETVSQYACQRRTTMENHNQIFTDAFAILAENAEFNESEGPCLAFRRAASLLKSLPHAISSSKDLEGLPCLGDQTKRVIEDILEYGQCSKVQDVLCDDRYQTIKLFTSVFGVGLKTAEKWYRKGLHTLEEVQADNAIHFTKMQKAGFLYYDDISAAVCKAEADAIGQIVEETVRLIAPDAIVTLTGGFRRGKECGHDVDFLITTPEMGKEVWLLNRLINRLQNQGILLYYDIVESTFDKTRLPCRKFEAMDHFQKCFAIIKLKKELAAGRVQKDWKAIRVDFVAPPVDNFAFALLGWTGSRQFERDLRRFARHERKMLLDNHALYDKTKKIFLPAKTEEDIFAHLGLDYIPPWQRNA

SEQ ID NO: 173 - protein, 494 aa, Artificial Sequence
  Modified TdT Sequences
MLHIPIFPPIKKRQKLPESRNSCKYEVKFSEVAIFLVERKMGSSRRKFLTNLARSKGFRIEDVLSDAVTHVVAEDNSADELWQWLQNSSLGDLSKIEVLDISWFTECMEAGKPVQVEARHCLVKSCPVIDQYLEPSTVETVSQYACQRRTTMENHNRIFTDAFAILAENAEFNESEGPCLAFRRAASLLKSLPHAISSSKDLEGLPCLGDQTKAVIEDILEYGQCSKVQDVLCDDRYQTIKLFTSVFGVGLKTAEKWYRKGFHSLEEVQADKAIHFTKMQKAGFLYYDDISAAVCKAEADAIGQIVEETVRLIAPDAIVTLTGGFRRGKECGHDVDFLITTPEMGKEVWLLNRLINRLQNQGILLYYDIVESTFDKTRLPCRKFEAMDHFQKCFAIIKLKKELAAGRVQKDWKAIRVDFVACPVDNFAFALLGWTGSKQFERDLRRFARHERKMLLDNHALYDKTKKIFLPAKTEEDIFAHLGLDYIPPWQRNA

SEQ ID NO: 174 - protein, 354 aa, Artificial Sequence
  Modified TdT Sequences
TVSQYACQRRTTMENHNQIFTDAFAILAENAEFNESEDPCLAFRRAASLLKSLPHAISSSKDLEGLPCLGDQTKAVIEDILEYGQCSKVQDVLCDDRYQTIKLFTSVFGVGLKTAEKWYRKGFHSLEEVQADKAIHFTKMQKAGFLYYDDISAAVCKAEADAIGQIVEETVRLIAPDAIVTLTGGFRRGKECGHDVDFLITTPEMGKEQLLPKVINLWEKKGLLLYYDLVESTFDKTRLPCRKFEAMDHFQKCFAIIKLKKELAAGRVQKDWKAIRVDFVMPPVDNFAFALLGWTGSRQFERDLRRFARHERKMLLDNHALYDKTKKIFLPAKTEEDIFAHLGLDYIPPWQRNA

SEQ ID NO: 175 - protein, 354 aa, Artificial Sequence
  Modified TdT Sequences
TVSQYACQRRTTMENHNQIFTDAFAILAENAEFNESEGPCLAFRRAASLLKSLPHAISSSKDLEGLPCLGDQTKAVIEDILEYGQCSKVQDVLCDDRYQTIKLFTSVFGVGLKTAEKWYRKGFHSLEEVQADNAIHFTKMQKAGFLYYDDISAAVCKAEAQAIGQIVEETVRLIAPDAIVTLTGGFRRGKECGHDVDFLITTPEMGKEQLLPKVINLWEKKGLLLYYDLVESTFDKTRLPCRKFEAMDHFQKCFAIIKLKKELAAGRVQKDWKAIRVDFVAPPVDNFAFALLGWTGSRQFERDLRRWARHERKMLLDNHALYDKTKKIFLPAKTEEDIFAHLGLDYIPPWQRNA

SEQ ID NO: 176 - protein, 354 aa, Artificial Sequence
  Modified TdT Sequences
TVSQYACQRRTTMENHNQIFTDAFAILAENAEFNESEGPCLAFRRAASLLKSLPHAISSSKDLEGLPCLGDQTKAVIEDILEYGQCSKVQDVLCDDRYQTIKLFTSVFGVGLKTAEKWYRKGFHTLEEVQADNAIHFTKMQKAGFLYYDDISAAVCKAEADAIGQIVEETVRLIAPDAIVTLTGGFRRGKECGHDVDFLITTPEMGKEQLLPKVINLWEKKGLLLYYDLVESTFDKTRLPCRKFEAMDHFQKCFAIIKLKKELAAGRVQKDWKAIRVDFVVCPVDNFAFALLGWTGSRQFERDLRRFARHERKMLLDNHALYDKTKKIFLPAKTEEDIFAHLGLDYIPPWQRNA

SEQ ID NO: 177 - protein, 354 aa, Artificial Sequence
  Modified TdT Sequences
TVSPYACQRRTTMENHNQIFTDAFAILAENAEFNESEGPCLAFRRAASLLKSLPHAISSSKDLEGLPCLGDQTKAVIEDILEYGQCSKVQDVLCDDRYQTIKLFTSVFGVGLKTAEKWYRKGFHSLEEVQADKAIHFTKMQRAGFLYYDDISAAVCKAEADAIGQIVEETVRLIAPDAIVTLTGGFRRGKECGHDVDFLITTPEMGKEQLLPKVINLWEKKGLLLYYDLVESTFDKTRLPCRKFEAMDHFQKCFAIIKLKKELAAGRVQKDWKAIRVDFVMPPVDNFAFALLGWTGSRQFERDLRRFARHERKMLLDNHALYDKTKKIFLPAKTEEDIFAHLGLDYIPPWQRNA

SEQ ID NO: 178 - protein, 354 aa, Artificial Sequence
  Modified TdT Sequences
TVSQYACQRRTTMENHNQIFTDAFAILAENAEFNESEGPCLAFRRAASLLKSLPHAISSSKDLEGLPCLGDQTKAVIQDILEYGQCSKVQDVLCDDRYQTIKLFTSVFGVGLKTAEKWYRKGFHSLEEVQADNSIHFTKMQKAGFLYYDDISAAVCKAEADAIGQIVEETVRLIAPDAIVTLTGGFRRGKECGHDVDFLITTPEMGKEQLLPKVINLWEKKGLLLYYDLVESTFDKTRLPCRKFEAMDHFQKCFAIIKLKKELAAGRVQKDWKAIRVDFVAPPVDNFAFALLGWTGSRQFERDLRRFARHERKMILDNHALYDKTKKIFLPAKTEEDIFAHLGLDYIPPWQRNA

SEQ ID NO: 179 - protein, 354 aa, Artificial Sequence
  Modified TdT Sequences
TVSQYACQRRTTMENHNQIFTDAFAILAENAEFNESEGPCLAFRRAASLLKSLPHAISSSKDLEGLPCLGDQTKAVIEDILEYGQCSKVQDVLCDDRYQTIKLFTSVFGVGLKTAEKWYRKGFHSLEEVQADNAIHFTKMQKAGFLYYDDISAAVCKAEADAIGQIVEETVRLIAPDAIVTLTGGFRRGKECGHDVDFLITTPEMGKEQLLPKVINLWEKKGLLLYYDLVESTFDKTRLPCRKFEAMDHFQKCFAIIKLKKELAAGRVQKDWKAIRVDFVAPPVDNFAFALLGWTGSRQFERDLRRFARHEKKMLLDNHALYDKTKKIFLPAKTEEDIFAHLGLDYIPPWQRNA

SEQ ID NO: 180 - protein, 354 aa, Artificial Sequence
  Modified TdT Sequences
TVSQYACQRRTTMENHNQIFTDAFAILAENAEFNESEGPCLAFRRAASLLKSLPHAISSSKDLEGLPCLGDQTKAVIEDILEYGQCSKVQDVLCDDRYQTIKLFTSVFGVGLKTAEKWYRKGFHSLEEVQADKAIHFTKMQKAGFLYYDDISAAVCKAEADAIGQIVEETVRLIAPDAIVTLTGGFRRGKECGHDVDFLITTPEMGKEQLLPKVINLWEKKGLLLYYDLVESTFDKTRLPCRKFEAMDHFQKCFAIIKLKKELAAGRVQKNWKAIRVDFVMCPVDNFAFALLGWTGSRQFERDLRRFARHERKMLLDNHALYDKTKKIFLPAKTEEDIFAHLGLDYIPPWQRNA

SEQ ID NO: 181 - protein, 354 aa, Artificial Sequence
  Modified TdT Sequences
TVSQYACQRRTTMENHNQIFTDAFAILAENAEFNESEGPCLAFRRAASLLKSLPHAISSSKDLEGLPCLGDQTKAVIEDILEYGQCSKVQDVLCDDRYQTIKLFTSVFGVGLKTAEKWYRKGFHSLEEVQADNTIHFTKMQKAGFLYYDDISAAVCKAEAQAIGQIVEETVRLIAPDAIVTLTGGFRRGKECGHDVDFLITTPEMGKEQLLPKVINLWEKKGLLLYYDLVESTFDKTRLPCRKFEAMDHFQKCFAIIKLKKELAAGRVQKDWKAIRVDFVAPPVDNFAFALLGWTGSRQFERDLRRFARHERKMLLDNHALYDKTKKIFLPAKTEEDIFAHLGLDYIPPWQRNA

SEQ ID NO: 182 - protein, 354 aa, Artificial Sequence
  Modified TdT Sequences
TVSQYACQRRTTMENHNQIFTDAFAILAENAEFNESEGPCLAFRRAASLLKSLPHAISSSKDLEGLPCLGDQTKAVIEDILEYGQCSKVQDVLCDDRYQTIKLFTSVFGVGLKTAEKWYRKGFHSLEEVQADKAIHFTKMQKAGFLYYDDISAAVCKAEAQAIGQIVEETVRLIAPDAIVTLTGGFRRGKNCGHDVDFLITTPEMGKEQLLPKVINLWEKKGLLLYYDLVESTFDKTRLPCRKFEAMDHFQKCFAIIKLKKELAAGRVQKDWKAIRVDFVMPPVDNFAFALLGWTGSRQFERDLRRFARHERKMLLDNHALYDKTKKIFLPAKTEEDIFAHLGLDYIPPWQRNA

SEQ ID NO: 183 - protein, 354 aa, Artificial Sequence
  Modified TdT Sequences
TVSQYACQRRTTMENHNKIFTDAFAILAENAEFNESEGPCLAFRRAASLLKSLPHAISSSKDLEGLPCLGDQTKAVIEDILEYGQCSKVQDVLCDDRYQTIKLFTSVFGVGLKTAEKWYRKGLHSLEEVQADNTIHFTKMQKAGFLYYDDISAAVCKAEADAIGQIVEETVRLIAPDAIVTLTGGFRRGKECGHDVDFLITTPEMGKEQLLPKVINLWEKKGLLLYYDLVESTFDKTRLPCRKFEAMDHFQKCFAIIKLKKELAAGRVQKDWKAIRVDFVAPPVDNFAFALLGWTGSRQFERDLRRFARHERKMLLDNHALYDKTKKIFLPAKTEEDIFAHLGLDYIPPWQRNA

SEQ ID NO: 184 - protein, 354 aa, Artificial Sequence
  Modified TdT Sequences
TVSQYACQRRTTMENHNQIFTDAFAILAENAEFNESEGPCLAFRRAASLLKSLPHAISSSKDLEGLPCLGDQTKAVIEDILEYGQCSKVQDVLCDDRYQTIKLFTSVFGVGLKTAEKWYRKGFHSLEEVQADKAIHFTKMQRAGFLYYDDISAAVCKAEADAIGQIVEETVRLIAPDAIVTLTGGFRRGKECGHDVDFLITTPEMGKEQLLPKVINLWEKKGLLLYYDLVESTFDKTRLPCRKFEAMDHFQKCFAIIKLKKELAAGRVQKDWKAIRVDFVMPPVDNFAFALLGWTGSRQFERDLRRFARHERKMLLDNHALYDKTKKIFLPAKTEEDIFAHLGLDYIPPWQRNA

SEQ ID NO: 185 - protein, 354 aa, Artificial Sequence
  Modified TdT Sequences
TVSQYACQRRTTMEHHNQIFTDAFAILAENAEFNESEGPCLAFRRAASLLKSLPHAISSSKDLEGLPCLGDQTKAVIEDILEYGQCSKVQDVLCDDRYQTIKLFTSVFGVGLKTAEKWYRKGFHSLEEVQADNAIHFTKMQKAGFLYYDDISAAVCKAEADAIGQIVEETVRLIAPDAIVTLTGGFRRGKECGHDVDFLITSPEMGKEQLLPKVINLWEKKGLLLYYDLVESTFDKTRLPCRKFEAMDHFQKCFAIIKLKKELAAGRVQKDWKAIRVDFVAPPVDNFAFALLGWTGSRQFERDLRRFARHERKMLLDNHALYDKTKKIFLPAKTEEDIFAHLGLDYIPPWQRNA

SEQ ID NO: 186 - protein, 354 aa, Artificial Sequence
  Modified TdT Sequences
TVSQYACQRRTTMENHNQIFTDAFAVLAENAEFNESEGPCLAFRRAASLLKSLPHAISSSKDLEGLPCLGDQTKAVIQDILEYGQCSKVQDVLCDDRYQTIKLFTSVFGVGLKTAEKWYRKGFHSLEEVQADNAIHFTKMQKAGFLYYDDISAAVCKAEADAIGQIVEETVRLIAPDAIVTLTGGFRRGKECGHDVDFLITTPEMGKEQLLPKVINLWEKKGLLLYYDLVESTFDKTRLPCRKFEAMDHFQKCFAIIKLKKELAAGRVQKDWKAIRVDFVAPPVDNFAFALLGWTGSRQFERDLRRFARHERKMLLDNHALYDKTKKIFLPAKTEEDIFAHLGLDYIDPWQRNA

SEQ ID NO: 187 - protein, 354 aa, Artificial Sequence
  Modified TdT Sequences
TVSQYACQRRTTMENHNQIFTDAFAILAENAEFNESEGPCLAFRRAASLLKSLPHAISSSKDLEGLPCLGDQTKAVIEDILEYGQCSKVQDVLCDDRYQTIKLFTSVFGVGLKTAEKWYRKGFHSLEEVQADNAIHFTKMQKAGFLYYDDISAAVCKAEADAIGQIVEETVRLIAPDAIVTLTGGFRRGKECGHDVDFLITTPEMGKEQLLPKVINLWEKKGLLLYYDLVESTFDKTRLPCRKFEAMDHFQKCFAIIKLKKELAAGRVQKDWKAIRVDFVVPPVDNFAFALLGWTGSRQFERDLRRFARHERKMILDNHALYDKTKKIFLPAKTEEDIFAHLGLDYIPPWQRNA

SEQ ID NO: 188 - protein, 354 aa, Artificial Sequence
  Modified TdT Sequences
TVSQYACQRRTTMENCNQIFTDAFAILAENAEFNESEGPCLAFRRAASLLKSLPHAISSSKDLEGLPCLGDQTKAVIEDILEYGQCSKVQDVLCDDRYQTIKLFTSVFGVGLKTAEKWYRKGFHSLEEVQADKAIHFTKMQKAGFLYYDDISAAVCKAEADAIGQIVEETVRLIAPDAIVTLTGGFRRGKECGHDVDFLITTPEMGKEQLLPKVINLWEKKGLLLYYDLVESTFDKTRLPCRKFEAMDHFQKCFAIIKLKKELAAGRVQKNWKAIRVDFVMPPVDNFAFALLGWTGSRQFERDLRRFARHERKMLLDNHALYDKTKKIFLPAKTEEDIFAHLGLDYIPPWQRNA

SEQ ID NO: 189 - protein, 354 aa, Artificial Sequence
  Modified TdT Sequences
TVSQYACQRRTTMENHNQIFTDAFAILAENAEFNESEGPCLAFRRAASLLKSLPHAISSSKDLEGLPCLGDQTKAVIEDILEYGQCSKVQDVLCDDRYQTIKLFTSVFGVGLKTAEKWYRKGFHSLEEVQADKAIHFTKMQKAGFLYYDDISAAVCRAEADAIGQIVEETVRLIAPDAIVTLTGGFRRGKECGHDVDFLITTPEMGKEQLLPKVINLWEKKGLLLYYDLVESTFDKTRLPCRKFEAMDHFQKCFAIIKLKKERAAGRVQKDWKAIRVDFVMPPVDNFAFALLGWTGSRQFERDLRRFARHERKMLLDNHALYDKTKKIFLPAKTEEDIFAHLGLDYIPPWQRNA

SEQ ID NO: 190 - protein, 354 aa, Artificial Sequence
  Modified TdT Sequences
TVSQYACQRRTTMENHNQIFTDAFAILAENAEFNESEGPCLAFRRAASLLKSLPHAISSSKDLEGLPCLGDQTKAVIEDILEYGQCSKVQDVLCDDRYQTIKLFTSVFGVGLKTAEKWYRKGFHSLEEVQADKAIHFTKMQKAGFLYYDDISAAVCKAEADAIGQIVEETVRLIAPDAIVTLTGGFRRGKECGHDVDFLITTPEMGKEQLLPKVINLWEKKGLLLYYDLVESTFDKTRLPCRKFEAMDHFQKCFAIIKLKKELAAGRVQKDWKAIRVDFVMPPVDNFAFALLGWTGSRQFERDLRRFARHERKMLLDNHALYDKTKKIFLPAKTEEDIFAHLGLDYIPPWQRNA

SEQ ID NO: 191 - protein, 354 aa, Artificial Sequence
  Modified TdT Sequences
TVSQYACQRRTTMENHNKIFTDAFAILAENAEFNESEGPCLAFRRAASLLKSLPHAISSSKDLEGLPCLGDQTKAVIEDILEYGQCSKVQDVLCDDRYQTIKLFTSVFGVGLKTAEKWYRKGFHSLEEVQADNAIHFTKMQKAGFLYYDDISAAVCKAEADAIGQIVEETVRLIAPDAIVTLTGGFRRGKECGHDVDFLITTPEMGKEQLLPKVINLWEKKGLLLYYDLVESTFDKTRLPCRKFEAMDHFQKCFAIIKLKKELAAGRVQKDWKAIRVDFVAAPVDNFAFALLGWTGSRQFERDLRRFARHERKMLLDNHALYDKTKKIFLPAKTEEDIFAHLGLDYIPPWQRNA

SEQ ID NO: 192 - protein, 354 aa, Artificial Sequence
  Modified TdT Sequences
TVSQYACQRRTTMENHNQIFTDAFAILAENAEFNESEGPCLAFRRAASLLKSLPHAISSSKDLEGLPCLGDQTKAVIQDILEYGQCSKVQDVLCDDRYQTIKLFTSVFGVGLKTAEKWYRKGFHSLEEVQADNTIHFTKMQKAGFLYYDDISAAVCKAEADAIGQIVEETVRLIAPDAIVTLTGGFRRGKECGHDVDFLITTPEMGKEQLLPKVINLWEKKGLLLYYDLVESTFDKTRLPCRKFEAMDHFQKCFAIIKLKKELAAGRVQKDWKAIRVDFVAPPVDNFAFALLGWTGSRQFERDLRRFARHERKMLLDNHALYDKTKKIFLPAKTEEDIFAHLGLDYIPPWQRNA

SEQ ID NO: 193 - protein, 354 aa, Artificial Sequence
  Modified TdT Sequences
TVSQYACQRRTTMENHNQIFTDAFAILAENAEFNESEGPCLAFRRAASLLKSLPHAISSSKDLEGLPCLGDQTKAVIEDILEYGQCSKVQDVLCDDRYQTIKLFTSVFGVGLKTAEKWYRKGFHSLEEVQADKAIHFTKMQKAGFLYYDDISAAVCKAEADAIGQIVEETVRLIAPDAIVTLTGGFRRGKECGHDVDFLITTPEMGKEQLLPKVINLWEKKGLLLYYDLVESTFDKTRLPCRKFEAMDHFQKCFAIIKLKKERAAGRVQKNWKAIRVDFVMPPVDNFAFALLGWTGSRQFERDLRRFARHERKMLLDNHALYDKTKKIFLPAKTEEDIFAHLGLDYIPPWQRNA

SEQ ID NO: 194 - protein, 354 aa, Artificial Sequence
  Modified TdT Sequences
TVSQYACQRRTTMENHNQIFTDAFAILAENAEFNESEGPCLAFRRAASLLKSLPHAISSSKDLEGLPCLGDQTKAVIEDILEYGQCSKVQDVLCDDRYQTIKLFTSVFGVGLKTAEKWYRKGFHSLEEVQADKAIHFTKMQKAGFLYYDDISAAVCKAEADAIGQIVEETVRLIAPDAIVTLTGGFRRGKECGHDVDFLITTPEMGKEQLLPKVINLWEKKGLLLYYDLVESTFDKTRLPCRKFEAMDHFQKCFAIIKLKKELAAGRVQKDWKAIRVDFVMCPVDNFAFALLGWTGSRQFERDLRRFARHERKMLLDNHALYDKTKKIFLPAKTEEDIFAHLGLDYIPPWQRNA

SEQ ID NO: 195 - protein, 354 aa, Artificial Sequence
  Modified TdT Sequences
TVSQYACQRRTTMENHNQIFTDAFAILAENAEFNESEGPCLAFRRAASLLKSLPHAISSSKDLEGLPCLGDQTKAVIEDILEYGQCSKVQDVLCDDRYQTIKLFTSVFGVGLKTAEKWYRKGFHSLEEVKADNAIHFTKMQKAGFLYYDDISAAVCKAEADAIGQIVEETVRLIAPDAIVTLTGGFRRGKECGHDVDFLITTPEMGKEQLLPKVINLWEKKGLLLYYDLVESTFDKTRLPCRKFEAMDHFQKCFAIIKLKKELAAGRVQKDWKAIRVDFVVPPVDNFAFALLGWTGSRQFERDLRRFARHERKMLLDNHALYDKTKKIFLPAKTEEDIFAHLGLDYIPPWQRNA

SEQ ID NO: 196 - protein, 354 aa, Artificial Sequence
  Modified TdT Sequences
TVSQYACQRRTTMEHHNQIFTDAFAILAENAEFNESEGPCLAFRRAASLLKSLPHAISSSKDLEGLPCLGDQTKRVIEDILEYGQCSKVQDVLCDDRYQTIKLFTSVFGVGLKTAEKWYRKGFHSLEEVQADNAIHFTKMQKAGFLYYDDISAAVCKAEADAIGQIVEETVRLIAPDAIVTLTGGFRRGKECGHDVDFLITTPEMGKEQLLPKVINLWEKKGLLLYYDLVESTFDKTRLPCRKFEAMDHFQKCFAIIKLKKELAAGRVQKDWKAIRVDFVAPPVDNFAFALLGWTGSRQFERDLRRFARHERKMLLDNHALYDKTKKIFLPAKTEEDIFAHLGLDYIPPWQRNA

SEQ ID NO: 197 - protein, 354 aa, Artificial Sequence
  Modified TdT Sequences
TVSQYACQRRTTMENHNQIFTDAFAILAENAEFNESEDPCLAFRRAASLLKSLPHAISSSKDLEGLPCLGDQTKAVIEDILEYGQCSKVQDVLCDDRYQTIKLFTSVFGVGLKTAEKWYRKGFHSLEEVQADKAIHFTKMQRAGFLYYDDISAAVCKAEADAIGQIVEETVRLIAPDAIVTLTGGFRRGKECGHDVDFLITTPEMGKEQLLPKVINLWEKKGLLLYYDLVESTFDKTRLPCRKFEAMDHFQKCFAIIKLKKELAAGRVQKDWKAIRVDFVACPVDNFAFALLGWTGSRQFERDLRRFARHERKMLLDNHALYDKTKKIFLPAKTEEDIFAHLGLDYIPPWQRNA

SEQ ID NO: 198 - protein, 354 aa, Artificial Sequence
  Modified TdT Sequences
TVSQYACQRRTTMENHNQIFTDAFAILAENAEFNESEGPCLAFRRAASLLKSLPHAISSSKDLEGLPCLGDQTKAVIQDILEYGQCSKVQDVLCDDRYQTIKLFTSVFGVGLKTAEKWYRKGFHSLEEVKADNAIHFTKMQKAGFLYYDDISAAVCKAEADAIGQIVEETVRLIAPDAIVTLTGGFRRGKECGHDVDFLITTPEMGKEQLLPKVINLWEKKGLLLYYDLVESTFDKTRLPCRKFEAMDHFQKCFAIIKLKKELAAGRVQKDWKAIRVDFVAPPVDNFAFALLGWTGSRQFERDLRRFARHERKMLLDNHALYDKTKKIFLPAKTEEDIFAHLGLDYIPPWQRNA

SEQ ID NO: 199 - protein, 354 aa, Artificial Sequence
  Modified TdT Sequences
TVSQYACQRRTTMENHNKIFTDAFAILAENAEFNESEGPCLAFRRAASLLKSLPHAISSSKDLEGLPCLGDQTKAVIQDILEYGQCSKVQDVLCDDRYQTIKLFTSVFGVGLKTAEKWYRKGFHSLEEVQADNAIHFTKMQKAGFLYYDDISAAVCKAEADAIGQIVEETVRLIAPDAIVTLTGGFRRGKECGHDVDFLITTPEMGKEQLLPKVINLWEKKGLLLYYDLVESTFDKTRLPCRKFEAMDHFQKCFAIIKLKKELAAGRVQKDWKAIRVDFVMPPVDNFAFALLGWTGSRQFERDLRRFARHERKMLLDNHALYDKTKKIFLPAKTEEDIFAHLGLDYIPPWQRNA

SEQ ID NO: 200 - protein, 354 aa, Artificial Sequence
  Modified TdT Sequences
TVSQYACQRRTTMENHNQIFTDAFAILAENAEFNESEGPCLAFRRAASLLKSLPHAISSSKDLEGLPCLGDQTKAVIEDILEYGQCSKVQDVLCDDRYQTIKLFTSVFGVGLKTAEKWYRKGFHSLEEVQADKAIHFTKMQKAGFLYYDDISAAVCKAEADAIGQIVEETVRLIAPDAIVTLTGGFRRGKECGHDVDFLITTPEMGKEQLLPKVINLWEKKGLLLYYDLVESTFDKTRLPCRKFEAMDHFQKCFAIIKLKKELAAGRVQKDWKAIRVDFVACPVDRFAFALLGWTGSRQFERDLRRFARHERKMLLDNHALYDKTKKIFLPAKTEEDIFAHLGLDYIPPWQRNA

SEQ ID NO: 201 - protein, 354 aa, Artificial Sequence
  Modified TdT Sequences
TVSQYACQRRTTMENHNQIFTDAFAILAENAEFNESEGPCLAFRRAASLLKSLPHAISSSKDLEGLPCLGDQTKAVIEDILEYGQCSKVQDVLCDDRYQTIKLFTSVFGVGLKTAEKWYRKGFHSLEEVQADKAIHFTKMQKAGFLYYDDISAAVCKAEADAIGQIVEETVRLIAPDAIVTLTGGFRRGKECGHDVDFLITTPEMGKEQLLPKVINLWEKKGLLLYYDLVESTFDKTRLPCRKFEAMDHFQKCFAIIKLKKELAAGRVQKNWKAIRVDFVLCPVDNFAFALLGWTGSRQFERDLRRFARHERKMLLDNHALYDKTKKIFLPAKTEEDIFAHLGLDYIPPWQRNA

SEQ ID NO: 202 - protein, 354 aa, Artificial Sequence
  Modified TdT Sequences
TVSQYACQRRTTMENHNQIFTDAFAVLAENAEFNESEGPCLAFRRAASLLKSLPHPISSSKDLEGLPCLGDQTKAVIEDILEYGQCSKVQDVLCDDRYQTIKLFTSVFGVGLKTAEKWYRKGFHSLEEVQADNAIHFTKMQKAGFLYYDDISAAVCKAEADAIGQIVEETVRLIAPDAIVTLTGGFRRGKECGHDVDFLITTPEMGKEQLLPKVINLWEKKGLLLYYDLVESTFDKTRLPCRKFEAMDHFQKCFAIIKLKKELAAGRVQKDWKAIRVDFVAAPVDNFAFALLGWTGSRQFERDLRRFARHERKMLLDNHALYDKTKKIFLPAKTEEDIFAHLGLDYIPPWQRNA

SEQ ID NO: 203 - protein, 354 aa, Artificial Sequence
  Modified TdT Sequences
TVSQYACQRRTTMENHNQIFTDAFAILAENAEFNESEGPCLAFRRAASLLKSLPHAISSSKDLEGLPCLGDQTKAVIEDILEYGQCSKVQDVLCDDRYQTIKLFTSVFGVGLKTAEKWYRKGFHSLEEVQADNAIHFTKMQKAGFLYYDDINAAVCKAEADAIGQIVEETVRLIAPDAIVTLTGGFRRGKECGHDVDFLITTPQMGKEQLLPKVINLWEKKGLLLYYDLVESTFDKTRLPCRKFEAMDHFQKCFAIIKLKKELAAGRVQKDWKAIRVDFVAPPVDNFAFALLGWTGSRQFERDLRRFARHERKMLLDNHALYDKTKKIFLPAKTEEDIFAHLGLDYIPPWQRNA

SEQ ID NO: 204 - protein, 354 aa, Artificial Sequence
  Modified TdT Sequences
TVSQYACQRRTTMENHNQIFTDAFAILAENAEFNESEGPCLAFRRAASLLKSLPHAISSSKDLEGLPCLGDQTKAVIEDILEYGQCSKVQDVLCDDRYQTIKLFTSVFGVGLKTAEKWYRKGFHTLEEVQADNAIHFTKMQKAGFLYYDDISAAVCKAEADAIGQIVEEAVRLIAPDAIVTLTGGFRRGKECGHDVDFLITSPEMGKEQLLPKVINLWEKKGLLLYYDLVESTFDKTRLPCRKFEAMDHFQKCFAIIKLKKELAAGRVQKDWKAIRVDFVAPPVDNFAFALLGWTGSRQFERDLRRFARHERKMLLDNHALYDKTKKIFLPAKTEEDIFAHLGLDYIPPWQRNA

SEQ ID NO: 205 - protein, 354 aa, Artificial Sequence
  Modified TdT Sequences
TVSQYACQRRTTMENHNQIFTDAFAILAENAEFNESEDPCLAFRRAASLLKSLPHAISSSRDLEGLPCLGDQTKAVIEDILEYGQCSKVQDVLCDDRYQTIKLFTSVFGVGLKTAEKWYRKGFHSLEEVQADKAIHFTKMQKAGFLYYDDISAAVCKAEADAIGQIVEETVRLIAPDAIVTLTGGFRRGKECGHDVDFLITTPEMGKEQLLPKVINLWEKKGLLLYYDLVESTFDKTRLPCRKFEAMDHFQKCFAIIKLKKELAAGRVQKDWKAIRVDFVMPPVDNFAFALLGWTGSRQFERDLRRFARHERKMLLDNHALYDKTKKIFLPAKTEEDIFAHLGLDYIPPWQRNA

SEQ ID NO: 206 - protein, 354 aa, Artificial Sequence
  Modified TdT Sequences
TVSQYACQRRTTMEHHNQIFTDAFAILAENAEFNESEGPCLAFRRAASLLKSLPHAISSSKDLEGLPCLGDQTKAVIEDILEYGQCSKVQDVLCDDRYQTIKLFTSVFGVGLKTAEKWYRKGFHSLEEVQADNAIHFTKMQKAGFLYYDDISAAVCKAEADAIGQIVEETVRLIAPDAIVTLTGGFRRGKECGHDVDFLITTPQMGKEQLLPKVINLWEKKGLLLYYDLVESTFDKTRLPCRKFEAMDHFQKCFAIIKLKKELAAGRVQKDWKAIRVDFVAPPVDNFAFALLGWTGSRQFERDLRRFARHERKMLLDNHALYDKTKKIFLPAKTEEDIFAHLGLDYIPPWQRNA

SEQ ID NO: 207 - protein, 354 aa, Artificial Sequence
  Modified TdT Sequences
TVSQYACQRRTTMENHNQIFTDAFAILAENAEFNESEGPCLAFRRAASLLKSLPHAISSSKDLEGLPCLGDQTKAVIEDILEYGQCSKVQDVLCDDRYQTIKLFTSVFGVGLKTAEKWYRKGFHSLEEVQADKAIHFTKMQKAGFLYYDDISAAVCKAEADAIGQIVEETVRLIAPDAIVTLTGGFRRGKECGHDVDFLITTPEMRKEQLLPKVINLWEKKGLLLYYDLVESTFDKTRLPCRKFEAMDHFQKCFAIIKLKKELAAGRVQKDWKAIRVDFVAAPVDNFAFALLGWTGSRQFERDLRRFARHERKMLLDNHALYDKTKKIFLPAKTEEDIFAHLGLDYIPPWQRNA

SEQ ID NO: 208 - protein, 354 aa, Artificial Sequence
  Modified TdT Sequences
TVSQYACQRRTTMENHNQIFTDAFAILAENAEFNESEGPCVAFRRAASLLKSLPHAISSSKDLEGLPCLGDQSKAVIEDILEYGQCSKVQDVLCDDRYQTIKLFTSVFGVGLKTAEKWYRKGFHSLEEVQADKAIHFTKMQKAGFLYYDDISAAVCKAEADAIGQIVEETVRLIAPDAIVTLTGGFRRGKECGHDVDFLITTPEMGKEQLLPKVINLWEKKGLLLYYDLVESTFDKTRLPCRKFEAMDHFQKCFAIIKLKKELAARRVQKDWKAIRVDFVMPPVDNFAFALLGWTGSRQFERDLRRFARHERKMLLDNHALYDKTKKIFLPAKTEEDIFAHLGLDYIPPWQRNA

SEQ ID NO: 209 - protein, 354 aa, Artificial Sequence
  Modified TdT Sequences
TVSQYACQRRTTMENHNQIFTDAFAILAENAEFNESEGPCLAFRRAASLLKSLPHAISSSKDLEGLPCLGDQTKAVIEDILEYGQCSKVQDVLCDDRYQTIKLFTSVFGVGLKTAEKWYRKGFHSLEEVQADKAIHFTKMQKAGFLYYDDISAAVCKAEADAIGQIVEETVRLIAPDAIVTLTGGFRRGKECGHDVDFLITTPEMGKEQLLPKVINLWEKKGLLLYYDLVESTFDKTRLPCRKFEAMDHFQKCFAIIKLKKELAAGRVQKDWKAIRVDFVLAPVDNFAFALLGWTGSRQFERDLRRFARHERKMLLDNHALYDKTKKIFLPAKTEEDIFAHLGLDYIPPWQRNA

SEQ ID NO: 210 - protein, 354 aa, Artificial Sequence
  Modified TdT Sequences
TVSQYACQRRTTMENHNQIFTDAFAILAENAEFNESEGPCLEFRRAASLLKSLPHAISSSKDLEGLPCLGDQTKAVIEDILEYGQCSKVQDVLCDDRYQTIKLFTSVFGVGLKTAEKWYRKGFHSLEEVQADKAIHFTKMQKAGFLYYDDISAAVCKAEADAIGQIVEETVRLIAPDAIVTLTGGFRRGKECGHDVDFLITTPEMGKEQLLPKVINLWEKKGLLLYYDLVESTFDKTRLPCRKFEAMDHFQKCFAIIKLKKELAAGRVQKDWKAIRVDFVMPPVDNFAFALLGWTGSRQFERDLRRFARHERKMLLDNHALYDKTKKIFLPAKTEEDIFAHLGLDYIPPWQRNA

SEQ ID NO: 211 - protein, 354 aa, Artificial Sequence; identical to SEQ ID NO: 190
  Modified TdT Sequences

SEQ ID NO: 212 - protein, 354 aa, Artificial Sequence
  Modified TdT Sequences
TVSQYACQRRTTMENHNQIFTDAFAILAENAEFNESEGPCLAFRRAASLLKSLPHAISSSKDLEGLPCLGDQTKRVIEDILEYGQCSKVQDVLCDDRYQTIKLFTSVFGVGLKTAEKWYRKGFHSLEEVQADNAIHFTKMQRAGFLYYDDISAAVCKAEADAIGQIVEETVRLIAPDAIVTLTGGFRRGKECGHDVDFLITTPEMGKEQLLPKVINLWEKKGLLLYYDLVESTFDKTRLPCRKFEAMDHFQKCFAIIKLKKELAAGRVQKDWKAIRVDFVAPPVDNFAFALLGWTGSRQFERDLRRFARHERKMLLDNHALYDKTKKIFLPAKTEEDIFAHLGLDYIPPWQRNA

SEQ ID NO: 213 - protein, 354 aa, Artificial Sequence
  Modified TdT Sequences
TVSQYACQRRTTMENHNQMFTDAFAILAENAEFNESEGPCLAFRRAASLLKSLPHAISSSKDLEGLPCLGDQTKAVIEDILEYGQCSKVQDVLCDDRYQTIKLFTSVFGVGLKTAEKWYRKGFHSLEEVQADKAIHFTKMQKAGFLYYDDISAAVCKAEAQAIGQIVEETVRLIAPDAIVTLTGGFRRGKECGHDVDFLITTPEMGKEQLLPKVINLWEKKGLLLYYDLVESTFDKTRLPCRKFEAMDHFQKCFAIIKLKKELAAGRVQKDWKAIRVDFVMCPVDNFAFALLGWTGSRQFERDLRRFARHERKMLLDNHALYDKTKKIFLPAKTEEDIFAHLGLDYIPPWQRNA

SEQ ID NO: 214 - protein, 354 aa, Artificial Sequence
  Modified TdT Sequences
TVSQYACQRRTTMENHNQIFTDAFAILAENAEFNESEGPCLAFRRAASLLKSLPHAISSSKDLEGLPCLGDQTKAVIEDILEYGQCSKVQDVLCDDRYQTIKLFTSVFGVGLKTAEKWYRKGLHSLEEVQADNAIHFTKMQKAGFLYYDDISAAVCKAEADAIGQIVEETVRLIAPDAIVTLTGGFRRGKECGHDVDFLITTPEMGKEQLLPKVINLWEKKGLLLYYDLVESTFDKTRLPCRKFEAMDHFQKCFAIIKLKKELAAGRVQKDWKAIRVDFVAPPVDNFAFALLGWTGSRQFERDLRRFARHEKKMLLDNHALYDKTKKIFLPAKTEEDIFAHLGLDYIPPWQRNA

SEQ ID NO: 215 - protein, 354 aa, Artificial Sequence
  Modified TdT Sequences
TVSQYACQRRTTMENHNQIFTDAFAILAENAEFNESEGPCLAFRRAASLLKSLPHAISSSKDLEGLPCLGDQSKAVIEDILEYGQCSKVQDVLCDDRYQTIKLFTSVFGVGLKTAEKWYRKGFHSLEEVQADKAIHFTKMQKAGFLYYDDISAAVCKAEADAIGQIVEETVRLIAPDAIVTLTGGFRRGKECGHDVDFLITTPEMGKEQLLPKVINLWEKKGLLLYYDLVESTFDKTRLPCRKFEAMDHFQKCFAIIKLKKELAAGRVQKDWKAIRVDFVMPPVDNFAFALLGWTGSRQFERDLRRFARHERKMLLDNHALYDKTKKIFLPAKTEEDIFAHLGLDYIPPWQRNA

SEQ ID NO: 216 - protein, 354 aa, Artificial Sequence
  Modified TdT Sequences
TVSQYACQRRTTMENHNQIFTDAFAILAENAEFNESEGPCLAFRRAASLLKSLPHPISSSKDLEGLPCLGDQTKAVIEDILEYGQCSKVQDVLCDDRYQTIKLFTSVFGVGLKTAEKWYRKGFHSLEEVQADNAIHFTKMQKAGFLYYDDISAAVCKAEAQAIGQIVEETVRLIAPDAIVTLTGGFRRGKECGHDVDFLITTPEMGKEQLLPKVINLWEKKGLLLYYDLVESTFDKTRLPCRKFEAMDHFQKCFAIIKLKKELAAGRVQKDWKAIRVDFVAPPVDNFAFALLGWTGSRQFERDLRRFARHERKMLLDNHALYDKTKKIFLPAKTEEDIFAHLGLDYIPPWQRNA

SEQ ID NO: 217 - protein, 354 aa, Artificial Sequence; identical to SEQ ID NO: 190
  Modified TdT Sequences

SEQ ID NO: 218 - protein, 354 aa, Artificial Sequence
  Modified TdT Sequences
TVSQYACQRRTTMENHNQIFTDAFAILAENAEFNESEGPCLAFRRAASLLKSLPHAISSSKDLEGLPCLGDQTKAVIEDILEYGQCSKVQDVLCDDRYQTIKLFTSVFGVGLKTAEKWYRKGFHSLEEVQADKAIHFTKMQKAGFLYYDDISAAVCKAEADAIGQIVEETVRLIAPDAIVTLTGGFRRGKECGHDVDFLITTPEMGKEQLLPKVINLWEKKGLLLYYDLVESTFDKTRLPCRKFEAMDHFQKCFAIIKLKKELAAGRVQKDWKAIRVDFVLPPVDRFAFALLGWTGSRQFERDLRRFARHERKMLLDNHALYDKTKKIFLPAKTEEDIFAHLGLDYIPPWQRNA

SEQ ID NO: 219 - protein, 354 aa, Artificial Sequence
  Modified TdT Sequences
TVSQYACQRRTTMENHNQIFTDAFAILAENAEFNESEGPCLAFRRAASLLKSLPHAISSSKDLEGLPCLGDQTKAVIEDILEYGQCSKVQDVLCDDRYQTIKLFTSVFGVGLKTAEKWYRKGFHSLEEVQADNAIHFTKMQKAGFLYYDDISAAVCKAEADAIGQIVEETVRLIAPDAIVTLTGGFRRGKECGHDVDFLITTPEMGKEQLLPKVINLWEKKGLLLYYDLVESTFDKTRLPCRKFEAMDHFQKCFAIIKLKKELAAGRVQKDWKAIRVDFVMCPVDNFAFALLGWTGSRQFERDLRRFARHERKMLLDNHALYDKTKKIFLPAKTEEDIFAHLGLDYIPPWQRNA

SEQ ID NO: 220 - protein, 354 aa, Artificial Sequence
  Modified TdT Sequences
TVSQYACQRRTTMENHNQIFTDAFAILAENAEFNESEGPCLAFRRAASLLKSLPHAISSSKDLEGLPCLGDQTKAVIEDILEYGQCSKVQDVLCDDRYQSIKLFTSVFGVGLKTAEKWYRKGFHSLEEVQADNAIHFTKMQKAGFLYYDDISAAVCKAEAQAIGQIVEETVRLIAPDAIVTLTGGFRRGKECGHDVDFLITTPEMGKEQLLPKVINLWEKKGLLLYYDLVESTFDKTRLPCRKFEAMDHFQKCFAIIKLKKELAAGRVQKDWKAIRVDFVAPPVDNFAFALLGWTGSRQFERDLRRFARHERKMLLDNHALYDKTKKIFLPAKTEEDIFAHLGLDYIPPWQRNA

SEQ ID NO: 221 - protein, 354 aa, Artificial Sequence
  Modified TdT Sequences
TVSQYACQRRTTMENHNQIFTDAFAILAENAEFNESEGPCLAFRRAASLLKSLPHAISSSKDLEGLPCLGDQTKAVIEDILEYGQCSKVQDVLCDDRYQTIKLFTSVFGVGLKTAEKWYRKGFHSLEEVQADNAIHFTKMQKAGFLYYDDISAAVCKAEADAIGQIVEETVRLIAPDAIVTLTGGFRRGKECGHDVDFLITSPEMGKEQLLPKVINLWEKKGLLLYYDLVESTFDKTRLPCRKFEAMDHFQKCFAIIKLKKELAAGRVQKDWKAIRVDFVAPPVDNFAFALLGWTGSRQFERDLRRFARHERKMLLDNHALYDKTKKIFLPAKTEEDIFAHLGLDYIPPWQRNA

SEQ ID NO: 222 - protein, 354 aa, Artificial Sequence
  Modified TdT Sequences
TVSQYACQRRTTMENHNQIFTDAFAILAENAEFNESEGPCLAFRRAASLLKSLPHAISSSKDLEGLPCLGDQSKAVIEDILEYGQCSKVQDVLCDDRYQTIKLFTSVFGVGLKTAEKWYRKGFHSLEEVQADKAIHFTKMQKAGFLYYDDISAAVCKAEADAIGQIVEETVRLIAPDAIVTLTGGFRRGKECGHDVDFLITTPEMGKEQLLPKVINLWEKKGLLLYYDLVESTFDKTRLPCRKFEAMDHFQKCFAIIKLKKELAAGRVQKDWKAIRVDFVMCPVDNFAFALLGWTGSRQFERDLRRFARHERKMLLDNHALYDKTKKIFLPAKTEEDIFAHLGLDYIPPWQRNA

SEQ ID NO: 223 - protein, 354 aa, Artificial Sequence
  Modified TdT Sequences
TVSQYACQRRTTMENHNQIFTDAFAILAENAEFNESEGPCLAFRRAASLLKSLPHPISSSKDLEGLPCLGDQSKAVIEDILEYGQCSKVQDVLCDDRYQTIKLFTSVFGVGLKTAEKWYRKGLHSLEEVQADNAIHFTKMQKAGFLYYDDISAAVCKAEADAIGQIVEETVRLIAPDAIVTLTGGFRRGKECGHDVDFLITTPEMGKEQLLPKVINLWEKKGLLLYYDLVESTFDKTRLPCRKFEAMDHFQKCFAIIKLKKELAAGRVQKDWKAIRVDFVAPPVDNFAFALLGWTGSRQFERDLRRFARHERKMLLDNHALYDKTKKIFLPAKTEEDIFAHLGLDYIPPWQRNA

SEQ ID NO: 224 - protein, 354 aa, Artificial Sequence
  Modified TdT Sequences
TVSQYACQRRTTMENHNQIFTDAFAILAENAEFNESEGPCLAFMRAASLLKSLPHAISSSKDLEGLPCLGDQTKAVIEDILEYGQCSKVQDVLCDDRYQTIKLFTSVFGVGLKTAEKWYRKGFHSLEEVQADNAIHFTKMQKAGFLYYDDISAAVCKAEAQAIGQIVEETVRLIAPDAIVTLTGGFRRGKECGHDVDFLITTPEMGKEQLLPKVINLWEKKGLLLYYDLVESTFDKTRLPCRKFEAMDHFQKCFAIIKLKKELAAGRVQKDWKAIRVDFVAPPVDNFAFALLGWTGSRQFERDLRRFARHEKKMLLDNHALYDKTKKIFLPAKTEEDIFAHLGLDYIPPWQRNA

SEQ ID NO: 225 - protein, 354 aa, Artificial Sequence
  Modified TdT Sequences
TVSQYACQRRTTMENHNRIFTDAFAILAENAEFNESEGPCLAFRRAASLLKSLPHAISSSKDLEGLPCLGDQTKAVIEDILEYGQCSKVQDVLCDDRYQTIKLFTSVFGVGLKTAEKWYRKGFHSLEEVQADKAIHFTKMQKAGFLYYDDISAAVCKAEADAIGQIVEETVRLIAPDAIVTLTGGFRRGKECGHDVDFLITTPEMGKEQLLPKVINLWEKKGLLLYYDLVESTFDKTRLPCRKFEAMDHFQKCFAIIKLKKELAAGRVQKDWKAIRVDFVMAPVDNFAFALLGWTGSRQFERDLRRFARHERKMLLDNHALYDKTKKIFLPAKTEEDIFAHLGLDYIPPWQRNA

SEQ ID NO: 226 - protein, 354 aa, Artificial Sequence
  Modified TdT Sequences
TVSQYACQRRTTMENHNQIFTDAFAILAENAEFNESEGPCLEFRRAASLLKSLPHAISSSKDLEGLPCLGDQTKAVIEDILEYGQCSKVQDVLCDDRYQTIKLFTSVFGVGLKTAEKWYRKGFHSLEEVQADNAIHFTKMQKAGFLYYDDISAAVCKAEADAIGQIVEETVRLIAPDAIVTLTGGFRRGKECGHDVDFLITTPEMGKEQLLPKVINLWEKKGLLLYYDLVESTFDKTRLPCRKFEAMDHFQKCFAIIKLKKELAAGRVQKDWKAIRVDFVAAPVDNFAFALLGWTGSRQFERDLRRFARHERKMLLDNHALYDKTKKIFLPAKTEEDIFAHLGLDYIPPWQRNA

SEQ ID NO: 227 - protein, 354 aa, Artificial Sequence
  Modified TdT Sequences
TVSQYACQRRTTMENHNQIFTDAFAILAENAEFNESEGPCLAFRRAASLLKSLPHAISSSKDLEGLPCLGDQSKAVIEDILEYGQCSKVQDVLCDDRYQTIKLFTSVFGVGLKTAEKWYRKGFHSLEEVQADNAIHFTKMQKAGFLYYDDISAAVCKAEADAIGQIVEETVRLIAPDAIVTLTGGFRRGKECGHDVDFLITTPEMGKEQLLPKVINLWEKKGLLLYYDLVESTFDKTRLPCRKFEAMDHFQKCFAIIKLKKELAAGRVQKDWKAIRVDFVMPPVDNFAFALLGWTGSRQFERDLRRFARHERKMLLDNHALYDKTKKIFLPAKTEEDIFAHLGLDYIPPWQRNA

SEQ ID NO: 228 - protein, 354 aa, Artificial Sequence
  Modified TdT Sequences
TVSQYACQRRTTMENHNQIFTDAFAILAENAEFNESEGPCLAFRRAASLLKSLPHAISSSKDLEGLPCLGDQTSAVIEDILEYGQCSKVQDVLCDDRYQTIKLFTSVFGVGLKTAEKWYRKGFHTLEEVQADNAIHFTKMQKAGFLYYDDISAAVCKAEADAIGQIVEETVRLIAPDAIVTLTGGFRRGKECGHDVDFLITTPEMGKEQLLPKVINLWEKKGLLLYYDLVESTFDKTRLPCRKFEAMDHFQKCFAIIKLKKELAAGRVQKDWKAIRVDFVAPPVDNFAFALLGWTGSRQFERDLRRFARHERKMLLDNHALYDKTKKIFLPAKTEEDIFAHLGLDYIPPWQRNA

SEQ ID NO: 229 - protein, 354 aa, Artificial Sequence
  Modified TdT Sequences
TVSQYACQRRTTMENHNQIFTDAFAILAENAEFNESEGPCLAFRRAASLLKSLPHAISSSKDLEGLPCLGDQTKAVIEDILEYGQCSKVQDVLCDDRYQTIKLFTSVFGVGLKTAEKWYRKGFHSLEEVQADNSIHFTKMQKAGFLYYDDISAAVCKAEADAIGQIVEETVRLIAPDAIVTLTGGFRRGKECGHDVDFLITTPEMGKEQLLPKVINLWEKKGLLLYYDLVESTFDKTRLPCRKFEAMDHFQKCFAIIKLKKELAAGRVQKDWKAIRVDFVAPPVDNFAFALLGWTGSRQFERDLRRFARHERKMLLDNHALYDKTKKIFLPAKTEEDIFAHLGLDYIPPWQRNA

SEQ ID NO: 230 - protein, 354 aa, Artificial Sequence
  Modified TdT Sequences
TVSQYACQRRTTMENHNQIFTDAFAILAENAEFNESEGPCLAFRRAASLLKSLPHAISSSKDLEGLPCLGDQTKAVIEDILEYGQCSKVQDVLCDDRYQTIKLFTSVFGVGLKTAEKWYRKGFHSLEEVQADKAIHFTKMQKAGFLYYDDISAAVCKAEADAIGQIVEETVRLIAPDAIVTLTGGFRRGKECGHDVDFLITTPEMGKEQLLPKVINLWEKKGLLLYYDLVESTFDKTRLPCRKFEAMDHFQKCFAIIKLKKELAAGRVQKDWKAIRVDFVMPPVDNFAFALLGWTGSRQFERDLRRFARHERKMLLDRHALYDKTKKIFLPAKTEEDIFAHLGLDYIPPWQRNA

SEQ ID NO: 231 - protein, 354 aa, Artificial Sequence
  Modified TdT Sequences
TVSQYACQRRTTMENHNQIFTDAFAILAENAEFNESEGPCLAFRRAASLLKSLPHAISSSKDLEGLPCLGDQTKAVIEDILEYGQCSKVQDVLCDDRYQTIKLFTSVFGVGLKTAEKWYRKGFHSLEEVQADKAIHFTKMQKAGFLYYDDISAAVCKAEADAIGQIVEETVRLIAPDAIVTLTGGFRRGKECGHDVDFLITTPEMGKEQLLPKVINLWEKKGLLLYYDLVESTFDKTRLPCRKFEAMDHFQKCFAIIKLKKELAAGRVQKDWKAIRVDFVMPPVDNFAFALLGWTGSKQFERDLRRFARHERKMLLDNHALYDKTKKIFLPAKTEEDIFAHLGLDYIPPWQRNA

SEQ ID NO: 232 - protein, 354 aa, Artificial Sequence; identical to SEQ ID NO: 194
  Modified TdT Sequences

SEQ ID NO: 233 - protein, 354 aa, Artificial Sequence
  Modified TdT Sequences
TVSQYACQRRTTMENHNQIFTDAFAILAENAEFNESEGPCLAFRRAASLLKSLPHAISSSKDLEGLPCLGDQTKAVIEDILEYGQCSKVQDVLCDDRYQTIKLFTSVFGVGLKTAEKWYRKGFHSLEEVQADNTIHFTKMQKAGFLYYDDISAAVCKAEADAIGQIVEEAVRLIAPDAIVTLTGGFRRGKECGHDVDFLITTPEMGKEQLLPKVINLWEKKGLLLYYDLVESTFDKTRLPCRKFEAMDHFQKCFAIIKLKKELAAGRVQKDWKAIRVDFVMPPVDNFAFALLGWTGSRQFERDLRRFARHERKMLLDNHALYDKTKKIFLPAKTEEDIFAHLGLDYIPPWQRNA

SEQ ID NO: 234 - protein, 354 aa, Artificial Sequence
  Modified TdT Sequences
TVSQYACQRRTTMENHNQIFTDAFAILAENAEFNESEDPCLAFRRAASLLKSLPHAISSSKDLEGLPCLGDQTKAVIEDILEYGQCSKVQDVLCDDRYQTIKLFTSVFGVGLKTAEKWYRKGFHSLEEVQADNAIHFTKMQKAGFLYYDDISAAVCKAEADAIGQIVEETVRLIAPDAIVTLTGGFRRGKECGHDVDFLITTPEMGKEQLLPKVINLWEKKGLLLYYDLVESTFDKTRLPCRKFEAMDHFQKCFAIIKLKKELAAGRVQKDWKAIRVDFVMPPVDNFAFALLGWTGSRQFERDLRRFARHERKMLLDNHALYDKTKKIFLPAKTEEDIFAHLGLDYIPPWQRNA

SEQ ID NO: 235 - protein, 354 aa, Artificial Sequence
  Modified TdT Sequences
TVSPYACQRRTTMENHNQIFTDAFAILAENAEFNESEGPCLAFRRAASLLKSLPHAISSSRDLEGLPCLGDQTKAVIEDILEYGQCSKVQDVLCDDRYQTIKLFTSVFGVGLKTAEKWYRKGFHSLEEVQADKAIHFTKMQKAGFLYYDDISAAVCKAEAQAIGQIVEETVRLIAPDAIVTLTGGFRRGKECGHDVDFLITTPEMGKEQLLPKVINLWEKKGLLLYYDLVESTFDKTRLPCRKFEAMDHFQKCFAIIKLKKELAAGRVQKDWKAIRVDFVMPPVDNFAFALLGWTGSRQFERDLRRFARHERKMLLDNHALYDKTKKIFLPAKTEEDIFAHLGLDYIPPWQRNA

SEQ ID NO: 236 - protein, 354 aa, Artificial Sequence
  Modified TdT Sequences
TVSQYACQRRTTMENCNQIFTDAFAILAENAEFNESEGPCLAFRRAASLLKSLPHAISSSKDLEGLPCLGDQSKAVIEDILEYGQCSKVQDVLCDDRYQTIKLFTSVFGVGLKTAEKWYRKGFHSLEEVQADKAIHFTKMQKAGFLYYDDISAAVCKAEADAIGQIVEETVRLIAPDAIVTLTGGFRRGKECGHDVDFLITTPEMGKEQLLPKVINLWEKKGLLLYYDLVESTFDKTRLPCRKFEAMDHFQKCFAIIKLKKELAAGRVQKDWKAIRVDFVMAPVDNFAFALLGWTGSRQFERDLRRFARHERKMLLDNHALYDKTKKIFLPAKTEEDIFAHLGLDYIPPWQRNA

SEQ ID NO: 237 - protein, 354 aa, Artificial Sequence
  Modified TdT Sequences
TVSQYACQRRTTMENHNQIFTDAFAILAENAEFNESEGPCLAFRRAASLLKSLPHAISSSKDLEGLPCLGDQTKAVIEDILEYGQCSKVQDVLCDDRYQTIKLFTSVFGVGLKTAEKWYRKGFHSLEEVQADNAIHFTKMQKAGFLYYDDISAAVCKAEADAIGQIVEETVRLIAPDAIVTLTGGFRRGKECGHDVDFLITTPQMGKEQLLPKVINLWEKKGLLLYYDLVESTFDKTRLPCRKFEAMDHFQKCFAIIKLKKELAAGRVQKDWKAIRVDFVAPPVDNFAFALLGWTGSRQFERDLRRFARHEKKMLLDNHALYDKTKKIFLPAKTEEDIFAHLGLDYIPPWQRNA

SEQ ID NO: 238 - protein, 354 aa, Artificial Sequence
  Modified TdT Sequences
TVSQYACQRRTTMENHNQIFTDAFAILAENAEFNESEGPCLAFRRAASLLKSLPHAISSSKDLEGLPCLGDQSKAVIEDILEYGQCSKVQDVLCDDRYQTIKLFTSVFGVGLKTAEKWYRKGFHSLEEVQADNAIHFTKMQRAGFLYYDDISAAVCKAEADAIGQIVEETVRLIAPDAIVTLTGGFRRGKECGHDVDFLITTPEMGKEQLLPKVINLWEKKGLLLYYDLVESTFDKTRLPCRKFEAMDHFQKCFAIIKLKKELAAGRVQKDWKAIRVDFVVPPVDNFAFALLGWTGSRQFERDLRRFARHERKMLLDNHALYDKTKKIFLPAKTEEDIFAHLGLDYIPPWQRNA

SEQ ID NO: 239 - protein, 354 aa, Artificial Sequence
  Modified TdT Sequences
TVSQYACQRRTTMENHNQIFTDAFAILAENAEFNESEGPCLAFMRAASLLKSLPHPISSSKDLEGLPCLGDQTSAVIEDILEYGQCSKVQDVLCDDRYQTIKLFTSVFGVGLKTAEKWYRKGFHSLEEVQADNAIHFTKMQKAGFLYYDDISAAVCKAEADAIGQIVEETVRLIAPDAIVTLTGGFRRGKECGHDVDFLITTPEMGKEQLLPKVINLWEKKGLLLYYDLVESTFDKTRLPCRKFEAMDHFQKCFAIIKLKKELAAGRVQKDWKAIRVDFVAPPVDNFAFALLGWTGSRQFERDLRRFARHERKMLLDNHALYDKTKKIFLPAKTEEDIFAHLGLDYIPPWQRNA

SEQ ID NO: 240 - protein, 354 aa, Artificial Sequence
  Modified TdT Sequences
TVSQYACQRRTTMENHNQIFTDAFAILAENAEFNESEGPCLAFRRAASLLKSLPHAISSSKDLEGLPCLGDQTKAVIEDILEYGQCSKVQDVLCDDRYQTIKLFTSVFGVGLKTAEKWYRKGFHSLEEVQADKAIHFTKMQRAGFLYYDDISAAVCKAEADAIGQIVEETVRLIAPDAIVTLTGGFRRGKECGHDVDFLITTPEMRKEQLLPKVINLWEKKGLLLYYDLVESTFDKTRLPCRKFEAMDHFQKCFAIIKLKKELAAGRVQKDWKAIRVDFVMPPVDNFAFALLGWTGSRQFERDLRRFARHERKMLLDNHALYDKTKKIFLPAKTEEDIFAHLGLDYIPPWQRNA

SEQ ID NO: 241 - protein, 354 aa, Artificial Sequence
  Modified TdT Sequences
TVSQYACQRRTTMENHNQMFTDAFAILAENAEFNESEGPCLAFRRAASLLKSLPHAISSSKDLEGLPCLGDQTKAVIEDILEYGQCSKVQDVLCDDRYQTIKLFTSVFGVGLKTAEKWYRKGFHSLEEVQADKAIHFTKMQKAGFLYYDDISAAVCKAEADAIGQIVEETVRLIAPDAIVTLTGGFRRGKECGHDVDFLITTPEMGKEQLLPKVINLWEKKGLLLYYDLVESTFDKTRLPCRKFEAMDHFQKCFAIIKLKKELAAGRVQKDWKAIRVDFVMPPVDNFAFALLGWTGSRQFERDLRRFARHERKMLLDNHALYDKTKKIFLPAKTEEDIFAHLGLDYIPPWQRNA

SEQ ID NO: 242 - protein, 354 aa, Artificial Sequence
  Modified TdT Sequences
TVSQYACQRRTTMENHNQIFTDAFAILAENAEFNESEGPCLAFRRAASLLKSLPHAISSSKDLEGLPCLGDQTKAVIEDILEYGQCSKVQDVLCDDRYQTIKLFTSVFGVGLKTAEKWYRKGFHSLEEVQADNAIHFTKMQKAGFLYYDDISAAVCKAEADAIGQIVEETVRLIAPDAIVTLTGGFRRGKECGHDVDFLITTPEMGKEQLLPKVINLWEKKGLLLYYDLVESTFDKTRLPCRKFEAMDHFQKCFAIIKLKKELAAGRVQKDWKAIRVDFVVAPVDNFAFALLGWTGSRQFERDLRRWARHERKMLLDNHALYDKTKKIFLPAKTEEDIFAHLGLDYIPPWQRNA

SEQ ID NO: 243 - protein, 354 aa, Artificial Sequence
  Modified TdT Sequences
TVSQYACQRRTTMENCNQIFTDAFAILAENAEFNESEGPCLAFRRAASLLKSLPHAISSSKDLEGLPCLGDQTKAVIEDILEYGQCSKVQDVLCDDRYQTIKLFTSVFGVGLKTAEKWYRKGFHSLEEVQADKAIHFTKMQKAGFLYYDDISAAVCKAEAQAIGQIVEETVRLIAPDAIVTLTGGFRRGKECGHDVDFLITTPEMGKEQLLPKVINLWEKKGLLLYYDLVESTFDKTRLPCRKFEAMDHFQKCFAIIKLKKELAAGRVQKDWKAIRVDFVACPVDNFAFALLGWTGSRQFERDLRRFARHERKMLLDNHALYDKTKKIFLPAKTEEDIFAHLGLDYIPPWQRNA

SEQ ID NO: 244 - protein, 354 aa, Artificial Sequence
  Modified TdT Sequences
TVSQYACQRRTTMENHNQIFTDAFAILAENAEFNESEGPCLEFRRAASLLKSLPHAISSSKDLEGLPCLGDQTKAVIEDILEYGQCSKVQDVLCDDRYQTIKLFTSVFGVGLKTAEKWYRKGFHSLEEVQADKAIHFTKMQKAGFLYYDDISAAVCKAEADAIGQIVEETVRLIAPDAIVTLTGGFRRGKECGHDVDFLITTPEMRKEQLLPKVINLWEKKGLLLYYDLVESTFDKTRLPCRKFEAMDHFQKCFAIIKLKKELAAGRVQKDWKAIRVDFVMPPVDNFAFALLGWTGSRQFERDLRRFARHERKMLLDNHALYDKTKKIFLPAKTEEDIFAHLGLDYIPPWQRNA

SEQ ID NO: 245 - protein, 354 aa, Artificial Sequence
  Modified TdT Sequences
TVSQYACQRRTTMENHNQIFTDAFAILAENAEFNESEGPCLAFRRAASLLKSLPHAISSSKDLEGLPCLGDQTKAVIEDILEYGQCSKVQDVLCDDRYQTIKLFTSVFGVGLKTAEKWYRKGFHSLEEVQADKAIHFTKMQKAGFLYYDDISAAVCKAEADAIGQIVEETVWLIAPDAIVTLTGGFRRGKECGHDVDFLITTPEMGKEQLLPKVINLWEKKGLLLYYDLVESTFDKTRLPCRKFEAMDHFQKCFAIIKLKKELAAGRVQKDWKAIRVDFVACPVDNFAFALLGWTGSRQFERDLRRFARHERKMLLDNHALYDKTKKIFLPAKTEEDIFAHLGLDYIPPWQRNA

SEQ ID NO: 246 - protein, 354 aa, Artificial Sequence
  Modified TdT Sequences
TVSQYACQRRTTMENHNQIFTDAFAILAENAEFNESEGPCLAFRRAASLLKSLPHAISSSKDLEGLPCLGDQTSAVIEDILEYGQCSKVQDVLCDDRYQTIKLFTSVFGVGLKTAEKWYRKGFHSLEEVQADNAIHFTKMQKAGFLYYDDISAAVCKAEADAIGQIVEETVRLIAPDAIVTLTGGFRRGKECGHDVDFLITTPEMGKEQLLPKVINLWEKKGLLLYYDLVESTFDKTRLPCRKFEAMDHFQKCFAIIKLKKELAAGRVQKDWKAIRVDFVAPPVDNFAFALLGWTGSRQFERDLRRFARHERKMILDNHALYDKTKKIFLPAKTEEDIFAHLGLDYIPPWQRNA

SEQ ID NO: 247 - protein, 354 aa, Artificial Sequence
  Modified TdT Sequences
TVSQYACQRRTTMENHNQIFTDAFAILAENAEFNESEGPCLAFRRAASLLKSLPHAISSSKDLEGLPCLGDQSKAVIEDILEYGQCSKVQDVLCDDRYQTIKLFTSVFGVGLKTAEKWYRKGFHSLEEVQADKAIHFTKMQKAGFLYYDDISAAVCKAEADAIGQIVEETVWLIAPDAIVTLTGGFRRGKECGHDVDFLITTPEMGKEQLLPKVINLWEKKGLLLYYDLVESTFDKTRLPCRKFEAMDHFQKCFAIIKLKKELAAGRVQKDWKAIRVDFVMCPVDNFAFALLGWTGSRQFERDLRRFARHERKMLLDNHALYDKTKKIFLPAKTEEDIFAHLGLDYIPPWQRNA

SEQ ID NO: 248 - protein, 354 aa, Artificial Sequence
  Modified TdT Sequences
TVSQYACQRRTTMENHNQIFTDAFAILAENAEFNESEGPCLAFRRAASLLKSLPHAISSSKDLEGLPCLGDQTKRVIEDILEYGQCSKVQDVLCDDRYQTIKLFTSVFGVGLKTAEKWYRKGFHSLEEVQADNAIHFTKMQKAGFLYYDDISAAVCKAEADAIGQIVEETVRLIAPDAIVTLTGGFRRGKECGHDVDFLITTPEMGKEQLLPKVINLWEKKGLLLYYDLVESTFDKTRLPCRKFEAMDHFQKCFAIIKLKKELAAGRVQKDWKAIRVDFVAPPVDNFAFALLGWTGSRQFERDLRRFARHERKMLLDNHALYDKTKKIFLPAKTEEDIFAHLGLDYIPPWQRNA

SEQ ID NO: 249 - protein, 354 aa, Artificial Sequence
  Modified TdT Sequences
TVSQYACQRRTTMENHNQIFTDAFAVLAENAEFNESEGPCLAFRRAASLLKSLPHAISSSKDLEGLPCLGDQSKAVIEDILEYGQCSKVQDVLCDDRYQTIKLFTSVFGVGLKTAEKWYRKGFHSLEEVQADNAIHFTKMQKAGFLYYDDISAAVCKAEADAIGQIVEETVRLIAPDAIVTLTGGFRRGKECGHDVDFLITTPEMGKEQLLPKVINLWEKKGLLLYYDLVESTFDKTRLPCRKFEAMDHFQKCFAIIKLKKELAAGRVQKDWKAIRVDFVAPPVDNFAFALLGWTGSRQFERDLRRWARHERKMLLDNHALYDKTKKIFLPAKTEEDIFAHLGLDYIPPWQRNA

SEQ ID NO: 250 - protein, 354 aa, Artificial Sequence
  Modified TdT Sequences
TVSQYACQRRTTMENHNKIFTDAFAILAENAEFNESEGPCLAFRRAASLLKSLPHAISSSKDLEGLPCLGDQTKAVIEDILEYGQCSKVQDVLCDDRYQTIKLFTSVFGVGLKTAEKWYRKGFHSLEEVQADNAIHFTKMQKAGFLYYDDISAAVCKAEAQAIGQIVEETVRLIAPDAIVTLTGGFRRGKECGHDVDFLITTPEMGKEQLLPKVINLWEKKGLLLYYDLVESTFDKTRLPCRKFEAMDAFQKCFAIIKLKKELAAGRVQKDWKAIRVDFVAPPVDNFAFALLGWTGSRQFERDLRRFARHERKMLLDNHALYDKTKKIFLPAKTEEDIFAHLGLDYIPPWQRNA

SEQ ID NO: 251 - protein, 354 aa, Artificial Sequence
  Modified TdT Sequences
TVSQYACQRRTTMENHNQIFTDAFAILAENAEFNESEGPCLAFRRAASLLKSLPHAISSSKDLEGLPCLGDQTKAVIEDILEYGQCSKVQDVLCDDRYQTIKLFTSVFGVGLKTAEKWYRKGFHSLEEVQADNAIHFTKMQKAGFLYYDDISAAVCKAEADAIGQIVEEAVRLIAPDAIVTLTGGFRRGKECGHDVDFLITTPEMGKEQLLPKVINLWEKKGLLLYYDLVESTFDKTRLPCRKFEAMDHFQKCFAIIKLKKELAAGRVQKDWKAIRVDFVAPPVDNFAFALLGWTGSRQFERDLRRFARHERKMLLDNHALYDKTKKIFLPAKTEEDIFAHLGLDYIDPWQRNA

SEQ ID NO: 252 - protein, 354 aa, Artificial Sequence; identical to SEQ ID NO: 184
  Modified TdT Sequences

SEQ ID NO: 253 - protein, 354 aa, Artificial Sequence
  Modified TdT Sequences
TVSQYACQRRTTMENHNQIFTDAFAILAENAEFNESEGPCLAFRRAASLLKSLPHPISSSKDLEGLPCLGDQTKAVIEDILEYGQCSKVQDVLCDDRYQTIKLFTSVFGVGLKTAEKWYRKGFHSLEEVQADNAIHFTKMQKAGFLYYDDISAAVCKAEADAIGQIVEETVRLIAPDAIVTLTGGFRRGKECGHDVDFLITTPEMGKEQLLPKVINLWEKKGLLLYYDLVESTFDKTRLPCRKFEAMDHFQKCFAIIKLKKELAAGRVQKDWKAIRVDFVAPPVDNFAFALLGWTGSRQFERDLRRFARHERKMILDNHALYDKTKKIFLPAKTEEDIFAHLGLDYIPPWQRNA

SEQ ID NO: 254 - protein, 354 aa, Artificial Sequence
  Modified TdT Sequences
TVSQYACQRRTTMENHNQIFTDAFAILAENAEFNESEGPCLAFMRAASLLKSLPHAISSSKDLEGLPCLGDQTKAVIEDILEYGQCSKVQDVLCDDRYQTIKLFTSVFGVGLKTAEKWYRKGFHSLEEVQADNAIHFTKMQKAGFLYYDDISAAVCKAEADAIGQIVEETVRLIAPDAIVTLTGGFRRGKECGHDVDFLITSPEMGKEQLLPKVINLWEKKGLLLYYDLVESTFDKTRLPCRKFEAMDHFQKCFAIIKLKKELAAGRVQKDWKAIRVDFVAPPVDNFAFALLGWTGSRQFERDLRRFARHERKMLLDNHALYDKTKKIFLPAKTEEDIFAHLGLDYIPPWQRNA

SEQ ID NO: 255 - protein, 354 aa, Artificial Sequence
  Modified TdT Sequences
TVSQYACQRRTTMENHNQIFTDAFAILAENAEFNESEGPCVAFRRAASLLKSLPHAISSSKDLEGLPCLGDQTKAVIEDILEYGQCSKVQDVLCDDRYQTIKLFTSVFGVGLKTAEKWYRKGFHSLEEVQADNAIHFTKMQKAGFLYYDDISAAVCKAEADAIGQIVEETVRLIAPDAIVTLTGGFRRGKECGHDVDFLITTPEMGKEQLLPKVINLWEKKGLLLYYDLVESTFDKTRLPCRKFEAMDHFQKCFAIIKLKKELAAGRVQKDWKAIRVDFVMCPVDNFAFALLGWTGSRQFERDLRRFARHERKMLLDNHALYDKTKKIFLPAKTEEDIFAHLGLDYIPPWQRNA

SEQ ID NO: 256 - protein, 354 aa, Artificial Sequence
  Modified TdT Sequences
TVSQYACQRRTTMENHNQIFTDAFAILAENAEFNESEGPCLAFRRAASLLKSLPHAISSSKDLEGLPCLGDQTKAVIEDILEYGQCSKVQDVLCDDRYQTIKLFTSVFGVGLKTAEKWYRKGFHSLEEVQADNAIHFTKMQKAGFLYYDDISAAVCKAEADAIGQIVEETVRLIAPDAIVTLTGGFRRGKECGHDVDFLITTPEMGKEQLLPKVINLWEKKGLLLYYDLVESTFDKTRLPCRKFEAMDHFQKCFAIIKLKKELAAGRVQKDWKAIRVDFVACPYDNFAFALLGWTGSRQFERDLRRFARHERKMLLDNHALYDKTKKIFLPAKTEEDIFAHLGLDYIPPWQRNA

SEQ ID NO: 257 - protein, 354 aa, Artificial Sequence
  Modified TdT Sequences
TVSQYACQRRTTMENHNQIFTDAFAILAENAEFNESEGPCLAFMRAASLLKSLPHAISSSKDLEGLPCLGDQTKAVIEDILEYGQCSKVQDVLCDDRYQTIKLFTSVFGVGLKTAEKWYRKGFHSLEEVQADNAIHFTKMQKAGFLYYDDISAAVCKAEADAIGQIVEEAVRLIAPDAIVTLTGGFRRGKECGHDVDFLITTPEMGKEQLLPKVINLWEKKGLLLYYDLVESTFDKTRLPCRKFEAMDHFQKCFAIIKLKKELAAGRVQKDWKAIRVDFVVPPVDNFAFALLGWTGSRQFERDLRRFARHERKMLLDNHALYDKTKKIFLPAKTEEDIFAHLGLDYIPPWQRNA

SEQ ID NO: 258 - protein, 354 aa, Artificial Sequence
  Modified TdT Sequences
TVSQYACQRRTTMENHNQIFTDAFAILAENAEFNESEGPCLAFRRAASLLKSLPHAISSSKDLEGLPCLGDQTKAVIEDILEYGQCSKVQDVLCDDRYQTIKLFTSVFGVGLKTAEKWYRKGFHSLEEVQADNAIHFTKMQKAGFLYYDDISAAVCKAEADAIGQIVEETVRLIAPDAIVTLTGGFRRGKNCGHDVDFLITTPEMGKEQLLPKVINLWEKKGLLLYYDLVESTFDKTRLPCRKFEAMDHFQKCFAIIKLKKELAAGRVQKDWKAIRVDFVLCPVDNFAFALLGWTGSRQFERDLRRFARHERKMLLDNHALYDKTKKIFLPAKTEEDIFAHLGLDYIPPWQRNA

SEQ ID NO: 259 - protein, 354 aa, Artificial Sequence; identical to SEQ ID NO: 200
  Modified TdT Sequences

SEQ ID NO: 260 - protein, 354 aa, Artificial Sequence
  Modified TdT Sequences
TVSQYACQRRTTMENHNQIFTDAFAILAENAEFNESEGPCLAFRRAASLLKSLPHAISSSKDLEGLPCLGDQTKAVIEDILEYGQCSKVQDVLCDDRYQTIKLFTSVFGVGLKTAEKWYRKGFHSLEEVQADNAIHFTKMQKAGFLYYDDISAAVCKAEAQAIGQIVEETVRLIAPDAIVTLTGGFRRGKECGHDVDFLITTPEMGKEQLLPKVINLWEKKGLLLYYDLVESTFDKTRLPCRKFEAMDHFQKCFAIIKLKKELAAGRVQKDWKAIRVDFVAPPVDNFAFALLGWTGSRQFERDLRRFARHERKMLLDNHALYDKTKKIFLPAKTEEDIFAHLGLDYIPPWQRNA

SEQ ID NO: 261 - protein, 354 aa, Artificial Sequence
  Modified TdT Sequences
TVSQYACQRRTTMEHHNQIFTDAFAILAENAEFNESEGPCLAFRRAASLLKSLPHAISSSKDLEGLPCLGDQTKAVIEDILEYGQCSKVQDVLCDDRYQTIKLFTSVFGVGLKTAEKWYRKGFHTLEEVQADNSIHFTKMQKAGFLYYDDISAAVCKAEADAIGQIVEETVRLIAPDAIVTLTGGFRRGKECGHDVDFLITTPEMGKEQLLPKVINLWEKKGLLLYYDLVESTFDKTRLPCRKFEAMDHFQKCFAIIKLKKELAAGRVQKDWKAIRVDFVAPPVDNFAFALLGWTGSRQFERDLRRFARHERKMLLDNHALYDKTKKIFLPAKTEEDIFAHLGLDYIPPWQRNA

SEQ ID NO: 262 - protein, 354 aa, Artificial Sequence
  Modified TdT Sequences
TVSQYACQRRTTMENHNQIFTDAFAILAENAEFNESEGPCLAFRRAASLLKSLPHAISSSKDLEGLPCLGDQTKAVIEDILEYGQCSKVQDVLCDDRYQTIKLFTSVFGVGLKTAEKWYRKGLHSLEEVQADNAIHFTKMQKAGFLYYDDISAAVCKAEADAIGQIVEETVRLIAPDAIVTLTGGFRRGKECGHDVDFLITTPEMGKEQLLPKVINLWEKKGLLLYYDLVESTFDKTRLPCRKFEAMDHFQKCFAIIKLKKELAAGRVQKDWKAIRVDFVAAPVDNFAFALLGWTGSRQFERDLRRFARHERKMLLDNHALYDKTKKIFLPAKTEEDIFAHLGLDYIPPWQRNA

SEQ ID NO: 263 - protein, 354 aa, Artificial Sequence
  Modified TdT Sequences
TVSQYACQRRTTMENHNKIFTDAFAILAENAEFNESEGPCLAFRRAASLLKSLPHAISSSKDLEGLPCLGDQTKAVIEDILEYGQCSKVQDVLCDDRYQTIKLFTSVFGVGLKTAEKWYRKGFHSLEEVQADNAIHFTKMQKAGFLYYDDISAAVCKAEADAIGQIVEETVRLIAPDAIVTLTGGFRRGKECGHDVDFLITTPEMGKEQLLPKVINLWEKKGLLLYYDLVESTFDKTRLPCRKFEAMDHFQKCFAIIKLKKELAAGRVQKDWKAIRVDFVVPPVDNFAFALLGWTGSRQFERDLRRFARHEKKMLLDNHALYDKTKKIFLPAKTEEDIFAHLGLDYIPPWQRNA

SEQ ID NO: 264 - protein, 354 aa, Artificial Sequence
  Modified TdT Sequences
TVSQYACQRRTTMENHNQMFTDAFAILAENAEFNESEGPCLAFRRAASLLKSLPHAISSSKDLEGLPCLGDQTKAVIEDILEYGQCSKVQDVLCDDRYQTIKLFTSVFGVGLKTAEKWYRKGFHSLEEVQADKAIHFTKMQKAGFLYYDDISAAVCKAEADAIGQIVEETVRLIAPDAIVTLTGGFRRGKECGHDVDFLITTPEMRKEQLLPKVINLWEKKGLLLYYDLVESTFDKTRLPCRKFEAMDHFQKCFAIIKLKKELAAGRVQKDWKAIRVDFVLCPVDNFAFALLGWTGSRQFERDLRRFARHERKMLLDNHALYDKTKKIFLPAKTEEDIFAHLGLDYIPPWQRNA

SEQ ID NO: 265 - protein, 354 aa, Artificial Sequence
  Modified TdT Sequences
TVSQYACQRRTTMENHNQIFTDAFAILAENAEFNESEGPCLAFRRAASLLKSLPHAISSSKDLEGLPCLGDQTKAVIEDILEYGQCSKVQDVLCDDRYQTIKLFTSVFGVGLKTAEKWYRKGFHTLEEVQADNAIHFTKMQKAGFLYYDDISAAVCKAEADAIGQIVEETVRLIAPDAIVTLTGGFRRGKECGHDVDFLITTPEMGKEQLLPKVINLWEKKGLLLYYDLVESTFDKTRLPCRKFEAMDHFQKCFAIIKLKKELAAGRVQKDWKAIRVDFVAPPVDNFAFALLGWTGSRQFERDLRRFARHERKMLLDNHALYDKTKKIFLPAKTEEDIFAHLGLDYIDPWQRNA

SEQ ID NO: 266 - protein, 354 aa, Artificial Sequence
  Modified TdT Sequences
TVSQYACQRRTTMENHNQIFTDAFAILAENAEFNESEGPCLAFRRAASLLKSLPHAISSSKDLEGLPCLGDQSKAVIEDILEYGQCSKVQDVLCDDRYQTIKLFTSVFGVGLKTAEKWYRKGFHSLEEVQADKAIHFTKMQKAGFLYYDDISAAVCKAEADAIGQIVEETVRLIAPDAIVTLTGGFRRGKECGHDVDFLITTPEMGKEQLLPKVINLWEKKGLLLYYDLVESTFDKTRLPCRKFEAMDHFQKCFAIIKLKKELAAGRVQKDWKAIRVDFVAPPVDNFAFALLGWTGSRQFERDLRRFARHERKMLLDNHALYDKTKKIFLPAKTEEDIFAHLGLDYIPPWQRNA

SEQ ID NO: 267 - protein, 354 aa, Artificial Sequence
  Modified TdT Sequences
TVSQYACQRRTTMENHNQIFTDAFAILAENAEFNESEGPCLAFRRAASLLKSLPHAISSSKDLEGLPCLGDQTKAVIEDILEYGQCSKVQDVLCDDRYQTIKLFTSVFGVGLKTAEKWYRKGFHSLEEVQADKAIHFTKMQKAGFLYYDDISAAVCKAEAQAIGQIVEETVWLIAPDAIVTLTGGFRRGKECGHDVDFLITTPEMGKEQLLPKVINLWEKKGLLLYYDLVESTFDKTRLPCRKFEAMDHFQKCFAIIKLKKELAAGRVQKDWKAIRVDFVMPPVDNFAFALLGWTGSKQFERDLRRFARHERKMLLDNHALYDKTKKIFLPAKTEEDIFAHLGLDYIPPWQRNA

SEQ ID NO: 268 - protein, 354 aa, Artificial Sequence
  Modified TdT Sequences
TVSQYACQRRTTMENHNQIFTDAFAILAENAEFNESEGPCLAFMRAASLLKSLPHAISSSKDLEGLPCLGDQTKAVIEDILEYGQCSKVQDVLCDDRYQTIKLFTSVFGVGLKTAEKWYRKGFHSLEEVQADNAIHFTKMQKAGFLYYDDINAAVCKAEADAIGQIVEETVRLIAPDAIVTLTGGFRRGKECGHDVDFLITTPEMGKEQLLPKVINLWEKKGLLLYYDLVESTFDKTRLPCRKFEAMDHFQKCFAIIKLKKELAAGRVQKDWKAIRVDFVAPPVDNFAFALLGWTGSRQFERDLRRFARHERKMLLDNHALYDKTKKIFLPAKTEEDIFAHLGLDYIPPWQRNA

SEQ ID NO: 269 - protein, 354 aa, Artificial Sequence
  Modified TdT Sequences
TVSQYACQRRTTMENHNQIFTDAFAILAENAEFNESEGPCLAFRRAASLLKSLPHAISSSKDLEGLPCLGDQTKAVIEDILEYGQCSKVQDVLCDDRYQTIKLFTSVFGVGLKTAEKWYRKGLHSLEEVQADNAIHFTKMQKAGFLYYDDISAAVCKAEADAIGQIVEETVRLIAPDAIVTLTGGFRRGKECGHDVDFLITTPEMGKEQLLPKVINLWEKKGLLLYYDLVESTFDKTRLPCRKFEAMDHFQKCFAIIKLKKELAAGRVQKDWKAIRVDFVMPPVDNFAFALLGWTGSRQFERDLRRFARHERKMLLDNHALYDKTKKIFLPAKTEEDIFAHLGLDYIPPWQRNA

SEQ ID NO: 270 - protein, 354 aa, Artificial Sequence
  Modified TdT Sequences
TVSQYACQRRTTMENHNQIFTDAFAILAENAEFNESEGPCLAFRRAASLLKSLPHAISSSKDLEGLPCLGDQTKAVIEDILEYGQCSKVQDVLCDDRYQTIKLFTSVFGVGLKTAEKWYRKGFHSLEEVQADKAIHFTKMQRAGFLYYDDISAAVCRAEAQAIGQIVEETVRLIAPDAIVTLTGGFRRGKECGHDVDFLITTPEMGKEQLLPKVINLWEKKGLLLYYDLVESTFDKTRLPCRKFEAMDHFQKCFAIIKLKKELAAGRVQKDWKAIRVDFVMPPVDNFAFALLGWTGSRQFERDLRRFARHERKMLLDNHALYDKTKKIFLPAKTEEDIFAHLGLDYIPPWQRNA

SEQ ID NO: 271 - protein, 354 aa, Artificial Sequence
  Modified TdT Sequences
TVSQYACQRRTTMENHNQIFTDAFAILAENAEFNESEGPCLAFRRAASLLKSLPHAISSSKDLEGLPCLGDQTKAVIEDILEYGQCSKVQDVLCDDRYQTIKLFTSVFGVGLKTAEKWYRKGFHSLEEVQADKAIHFTKMQKAGFLYYDDISAAVCKAEADAIGQIVEETVRLIAPDAIVTLTGGFRRGKECGHDVDFLITTPEMGKEQLLPKVINLWEKKGLLLYYDLVESTFDKTRLPCRKFEAMDHFQKCFAIIKLKKELAAGRVQKDWKAIRVDFVACPVDNFAFALLGWTGSRQFERDLRRFARHERKMLLDNHALYDKTKKIFLPAKTEEDIFAHLGLDYIPPWQRNA

SEQ ID NO: 272 - protein, 354 aa, Artificial Sequence; identical to SEQ ID NO: 241
  Modified TdT Sequences

SEQ ID NO: 273 - protein, 354 aa, Artificial Sequence
  Modified TdT Sequences
TVSQYACQRRTTMENHNQIFTDAFAILAENAEFNESEGPCLAFRRAASLLKSLPHAISSSKDLEGLPCLGDQTKAVIEDILEYGQCSKVQDVLCDDRYQTIKLFTSVFGVGLKTAEKWYRKGFHSLEEVQADKAIHFTKMQKAGFLYYDDISAAVCKAEAQAIGQIVEETVRLIAPDAIVTLTGGFRRGKECGHDVDFLITTPEMGKEQLLPKVINLWEKKGLLLYYDLVESTFDKTRLPCRKFEAMDHFQKCFAIIKLKKELAAGRVQKDWKAIRVDFVACPVDNFAFALLGWTGSRQFERDLRRFARHERKMLLDNHALYDKTKKIFLPAKTEEDIFAHLGLDYIPPWQRNA

SEQ ID NO: 274 - protein, 354 aa, Artificial Sequence
  Modified TdT Sequences
TVSQYACQRRTTMENHNQIFTDAFAVLAENAEFNESEGPCLAFRRAASLLKSLPHAISSSKDLEGLPCLGDQTKAVIEDILEYGQCSKVQDVLCDDRYQTIKLFTSVFGVGLKTAEKWYRKGFHSLEEVKADNTIHFTKMQKAGFLYYDDISAAVCKAEADAIGQIVEETVRLIAPDAIVTLTGGFRRGKECGHDVDFLITTPEMGKEQLLPKVINLWEKKGLLLYYDLVESTFDKTRLPCRKFEAMDHFQKCFAIIKLKKELAAGRVQKDWKAIRVDFVAPPVDNFAFALLGWTGSRQFERDLRRFARHERKMLLDNHALYDKTKKIFLPAKTEEDIFAHLGLDYIPPWQRNA

SEQ ID NO: 275 - protein, 354 aa, Artificial Sequence
  Modified TdT Sequences
TVSQYACQRRTTMENHNQIFTDAFAILAENAEFNESEGPCLAFRRAASLLKSLPHAISSSKDLEGLPCLGDQTKAVIEDILEYGQCSKVQDVLCDDRYQSIKLFTSVFGVGLKTAEKWYRKGLHSLEEVQADNAIHFTKMQKAGFLYYDDINAAVCKAEADAIGQIVEETVRLIAPDAIVTLTGGFRRGKECGHDVDFLITTPEMGKEQLLPKVINLWEKKGLLLYYDLVESTFDKTRLPCRKFEAMDHFQKCFAIIKLKKELAAGRVQKDWKAIRVDFVAPPVDNFAFALLGWTGSRQFERDLRRFARHERKMLLDNHALYDKTKKIFLPAKTEEDIFAHLGLDYIPPWQRNA

SEQ ID NO: 276 - protein, 354 aa, Artificial Sequence
  Modified TdT Sequences
TVSQYACQRRTTMENHNQIFTDAFAILAENAEFNESEGPCLAFRRAASLLKSLPHAISSSKDLEGLPCLGDQTKAVIEDILEYGQCSKVQDVLCDDRYQTIKLFTSVFGVGLKTAEKWYRKGFHSLEEVQADNAIHFTKMQKAGFLYYDDISAAVCKAEADAIGQIVEETVRLIAPDAIVTLTGGFRRGKECGHDVDFLITTPEMGKEQLLPKVINLWEKKGLLLYYDLVESTFDKTRLPCRKFEAMDAFQKCFAIIKLKKELAAGRVQKDWKAIRVDFVAPPYDNFAFALLGWTGSRQFERDLRRFARHERKMLLDNHALYDKTKKIFLPAKTEEDIFAHLGLDYIPPWQRNA

SEQ ID NO: 277 - protein, 354 aa, Artificial Sequence
  Modified TdT Sequences
TVSQYACQRRTTMENHNQIFTDAFAILAENAEFNESEGPCLAFRRAASLLKSLPHAISSSKDLEGLPCLGDQTKAVIEDILEYGQCSKVQDVLCDDRYQTIKLFTSVFGVGLKTAEKWYRKGFHSLEEVQADKAIHFTKMQKAGFLYYDDISAAVCKAEADAIGQIVEETVRLIAPDAIVTLTGGFRRGKECGHDVDFLITTPEMGKEQLLPKVINLWEKKGLLLYYDLVESTFDKTRLPCRKFEAMDHFQKCFAIIKLKKELAAGRVQKDWKAIRVDFVMAPVDNFAFALLGWTGSRQFERDLRRFARHERKMLLDNHALYDKTKKIFLPAKTEEDIFAHLGLDYIPPWQRNA

SEQ ID NO: 278 - protein, 354 aa, Artificial Sequence
  Modified TdT Sequences
TVSQYACQRRTTMENHNQIFTDAFAILAENAEFNESEGPCLAFRRAASLLKSLPHAISSSKDLEGLPCLGDQTKAVIEDILEYGQCSKVQDVLCDDRYQTIKLFTSVFGVGLKTAEKWYRKGFHSLEEVQADKAIHFTKMQKAGFLYYDDISAAVCKAEADAIGQIVEETVRLIAPDAIVTLTGGFRRGKECGHDVDFLITTPEMGKEQLLPKVINLWEKKGLLLYYDLVESTFDKTRLPCRKFEAMDHFQKCFAIIKLKKELAAGRVQKDWKAIRVDFVMPPVDRFAFALLGWTGSRQFERDLRRFARHERKMLLDNHALYDKTKKIFLPAKTEEDIFAHLGLDYIPPWQRNA

SEQ ID NO: 279 - protein, 354 aa, Artificial Sequence
  Modified TdT Sequences
TVSQYACQRRTTMENHNQIFTDAFAILAENAEFNESEGPCLAFRRAASLLKSLPHAISSSKDLEGLPCLGDQTKAVIQDILEYGQCSKVQDVLCDDRYQTIKLFTSVFGVGLKTAEKWYRKGFHSLEEVQADNAIHFTKMQKAGFLYYDDISAAVCKAEADAIGQIVEETVRLIAPDAIVTLTGGFRRGKECGHDVDFLITTPEMGKEQLLPKVINLWEKKGLLLYYDLVESTFDKTRLPCRKFEAMDHFQKCFAIIKLKKELAAGRVQKDWKAIRVDFVAPPVDNFAFALLGWTGSRQFERDLRRFARHERKMLLDNHALYDKTKKIFLPAKTEEDIFAHLGLDYIPPWQRNA

SEQ ID NO: 280 - protein, 354 aa, Artificial Sequence
  Modified TdT Sequences
TVSQYACQRRTTMENHNQIFTDAFAILAENAEFNESEGPCLAFRRAASLLKSLPHAISSSKDLEGLPCLGDQTKAVIEDILEYGQCSKVQDVLCDDRYQTIKLFTSVFGVGLKTAEKWYRKGFHSLEEVQADKAIHFTKMQKAGFLYYDDISAAVCKAEAQAIGQIVEETVRLIAPDAIVTLTGGFRRGKECGHDVDFLITTPEMGKEQLLPKVINLWEKKGLLLYYDLVESTFDKTRLPCRKFEAMDHFQKCFAIIKLKKELAAGRVQKDWKAIRVDFVMPPVDNFAFALLGWTGSRQFERDLRRFARHERKMLLDNHALYDKTKKIFLPAKTEEDIFAHLGLDYIPPWQRNA

SEQ ID NO: 281 - protein, 354 aa, Artificial Sequence
  Modified TdT Sequences
TVSQYACQRRTTMENHNQIFTDAFAILAENAEFNESEGPCLAFRRAASLLKSLPHAISSSKDLEGLPCLGDQTKAVIEDILEYGQCSKVQDVLCDDRYQTIKLFTSVFGVGLKTAEKWYRKGLHSLEEVQADNAIHFTKMQKAGFLYYDDISAAVCKAEADAIGQIVEETVRLIAPDAIVTLTGGFRRGKECGHDVDFLITSPEMGKEQLLPKVINLWEKKGLLLYYDLVESTFDKTRLPCRKFEAMDAFQKCFAIIKLKKELAAGRVQKDWKAIRVDFVAPPVDNFAFALLGWTGSRQFERDLRRFARHERKMLLDNHALYDKTKKIFLPAKTEEDIFAHLGLDYIPPWQRNA

SEQ ID NO: 282 - protein, 354 aa, Artificial Sequence
  Modified TdT Sequences
TVSQYACQRRTTMENHNQIFTDAFAILAENAEFNESEGPCLAFRRAASLLKSLPHAISSSKDLEGLPCLGDQTKAVIEDILEYGQCSKVQDVLCDDRYQTIKLFTSVFGVGLKTAEKWYRKGFHSLEEVQADKAIHFTKMQKAGFLYYDDISAAVCKAEADAIGQIVEETVRLIAPDAIVTLTGGFRRGKECGHDVDFLITTPEMGKEQLLPKVINLWEKKGLLLYYDLVESTFDKTRLPCRKFEAMDHFQKCFAIIKLKKELAARRVQKDWKAIRVDFVACPVDNFAFALLGWTGSRQFERDLRRFARHERKMLLDNHALYDKTKKIFLPAKTEEDIFAHLGLDYIPPWQRNA

SEQ ID NO: 283 - protein, 354 aa, Artificial Sequence
  Modified TdT Sequences
TVSQYACQRRTTMENHNQIFTDAFAILAENAEFNESEGPCLAFRRAASLLKSLPHAISSSKDLEGLPCLGDQSKAVIEDILEYGQCSKVQDVLCDDRYQTIKLFTSVFGVGLKTAEKWYRKGFHSLEEVQADNAIHFTKMQKAGFLYYDDISAAVCKAEADAIGQIVEETVRLIAPDAIVTLTGGFRRGKECGHDVDFLITTPEMGKEQLLPKVINLWEKKGLLLYYDLVESTFDKTRLPCRKFEAMDHFQKCFAIIKLKKELAAGRVQKDWKAIRVDFVAPPVDNFAFALLGWTGSRQFERDLRRFARHERKMLLDNHALYDKTKKIFLPAKTEEDIFAHLGLDYIPPWQRNA

SEQ ID NO: 284 - protein, 354 aa, Artificial Sequence
  Modified TdT Sequences
TVSQYACQRRTTMENHNQIFTDAFAILAENAEFNESEGPCLAFRRAASLLKSLPHAISSSKDLEGLPCLGDQSKAVIEDILEYGQCSKVQDVLCDDRYQTIKLFTSVFGVGLKTAEKWYRKGFHSLEEVQADKAIHFTKMQKAGFLYYDDISAAVCRAEADAIGQIVEETVRLIAPDAIVTLTGGFRRGKECGHDVDFLITTPEMGKEQLLPKVINLWEKKGLLLYYDLVESTFDKTRLPCRKFEAMDHFQKCFAIIKLKKELAAGRVQKDWKAIRVDFVMPPVDNFAFALLGWTGSRQFERDLRRFARHERKMLLDNHALYDKTKKIFLPAKTEEDIFAHLGLDYIPPWQRNA

SEQ ID NO: 285 - protein, 354 aa, Artificial Sequence
  Modified TdT Sequences
TVSQYACQRRTTMENHNKIFTDAFAILAENAEFNESEGPCLAFRRAASLLKSLPHAISSSKDLEGLPCLGDQTKAVIEDILEYGQCSKVQDVLCDDRYQTIKLFTSVFGVGLKTAEKWYRKGFHSLEEVQADKAIHFTKMQKAGFLYYDDISAAVCKAEADAIGQIVEETVRLIAPDAIVTLTGGFRRGKECGHDVDFLITTPEMGKEQLLPKVINLWEKKGLLLYYDLVESTFDKTRLPCRKFEAMDHFQKCFAIIKLKKELAAGRVQKDWKAIRVDFVAPPVDNFAFALLGWTGSRQFERDLRRFARHERKMLLDNHALYDKTKKIFLPAKTEEDIFAHLGLDYIPPWQRNA

SEQ ID NO: 286 - protein, 354 aa, Artificial Sequence
  Modified TdT Sequences
TVSQYACQRRTTMENHNQIFTDAFAILAENAEFNESEGPCLAFRRAASLLKSLPHAISSSKDLEGLPCLGDQTKAVIEDILEYGQCSKVQDVLCDDRYQTIKLFTSVFGVGLKTAEKWYRKGFHSLEEVQADKAIHFTKMQKAGFLYYDDISAAVCKAEADAIGQIVEETVRLIAPDAIVTLTGGFRRGKECGHDVDFLITTPEMGKEQLLPKVINLWEKKGLLLYYDLVESTFDKTRLPCRKFEAMDHFQKCFAIIKLKKERAAGRVQKDWKAIRVDFVMCPVDNFAFALLGWTGSRQFERDLRRFARHERKMLLDNHALYDKTKKIFLPAKTEEDIFAHLGLDYIPPWQRNA

SEQ ID NO: 287 - protein, 354 aa, Artificial Sequence
  Modified TdT Sequences
TVSQYACQRRTTMENHNQIFTDAFAILAENAEFNESEGPCLAFRRAASLLKSLPHAISSSKDLEGLPCLGDQTKAVIEDILEYGQCSKVQDVLCDDRYQTIKLFTSVFGVGLKTAEKWYRKGFHSLEEVQADKAIHFTKMQKAGFLYYDDISAAVCKAEADAIGQIVEETVWLIAPDAIVTLTGGFRRGKECGHDVDFLITTPEMGKEQLLPKVINLWEKKGLLLYYDLVESTFDKTRLPCRKFEAMDHFQKCFAIIKLKKELAARRVQKDWKAIRVDFVMPPVDNFAFALLGWTGSRQFERDLRRFARHERKMLLDNHALYDKTKKIFLPAKTEEDIFAHLGLDYIPPWQRNA

SEQ ID NO: 288 - protein, 354 aa, Artificial Sequence
  Modified TdT Sequences
TVSQYACQRRTTMEHHNQIFTDAFAILAENAEFNESEGPCLAFRRAASLLKSLPHAISSSKDLEGLPCLGDQTKAVIEDILEYGQCSKVQDVLCDDRYQTIKLFTSVFGVGLKTAEKWYRKGFHSLEEVQADNAIHFTKMQKAGFLYYDDISAAVCKAEADAIGQIVEETVRLIAPDAIVTLTGGFRRGKECGHDVDFLITTPEMGKEQLLPKVINLWEKKGLLLYYDLVESTFDKTRLPCRKFEAMDHFQKCFAIIKLKKELAAGRVQKDWKAIRVDFVAPPYDNFAFALLGWTGSRQFERDLRRFARHERKMLLDNHALYDKTKKIFLPAKTEEDIFAHLGLDYIPPWQRNA

SEQ ID NO: 289 - protein, 354 aa, Artificial Sequence
  Modified TdT Sequences
TVSQYACQRRTTMENHNKIFTDAFAILAENAEFNESEGPCLAFRRAASLLKSLPHAISSSKDLEGLPCLGDQTKAVIEDILEYGQCSKVQDVLCDDRYQTIKLFTSVFGVGLKTAEKWYRKGFHSLEEVQADNAIHFTKMQKAGFLYYDDISAAVCKAEADAIGQIVEETVRLIAPDAIVTLTGGFRRGKECGHDVDFLITTPEMGKEQLLPKVINLWEKKGLLLYYDLVESTFDKTRLPCRKFEAMDHFQKCFAIIKLKKELAAGRVQKDWKAIRVDFVAPPVDNFAFALLGWTGSRQFERDLRRFARHERKMLLDNHALYDKTKKIFLPAKTEEDIFAHLGLDYIPPWQRNA

SEQ ID NO: 290 - protein, 354 aa, Artificial Sequence; identical to SEQ ID NO: 271
  Modified TdT Sequences

SEQ ID NO: 291 - protein, 354 aa, Artificial Sequence
  Modified TdT Sequences
TVSQYACQRRTTMENHNQIFTDAFAILAENAEFNESEGPCLAFRRAASLLKSLPHAISSSKDLEGLPCLGDQTKAVIEDILEYGQCSKVQDVLCDDRYQTIKLFTSVFGVGLKTAEKWYRKGFHSLEEVQADKAIHFTKMQRAGFLYYDDISAAVCKAEADAIGQIVEETVRLIAPDAIVTLTGGFRRGKECGHDVDFLITTPEMGKEQLLPKVINLWEKKGLLLYYDLVESTFDKTRLPCRKFEAMDHFQKCFAIIKLKKELAARRVQKDWKAIRVDFVMPPVDNFAFALLGWTGSRQFERDLRRFARHERKMLLDNHALYDKTKKIFLPAKTEEDIFAHLGLDYIPPWQRNA

SEQ ID NO: 292 - protein, 354 aa, Artificial Sequence
  Modified TdT Sequences
TVSQYACQRRTTMENHNQIFTDAFAILAENAEFNESEGPCLAFRRAASLLKSLPHAISSSKDLEGLPCLGDQTKAVIQDILEYGQCSKVQDVLCDDRYQTIKLFTSVFGVGLKTAEKWYRKGLHSLEEVQADNAIHFTKMQKAGFLYYDDISAAVCKAEADAIGQIVEETVRLIAPDAIVTLTGGFRRGKECGHDVDFLITTPEMGKEQLLPKVINLWEKKGLLLYYDLVESTFDKTRLPCRKFEAMDHFQKCFAIIKLKKELAAGRVQKDWKAIRVDFVVPPVDNFAFALLGWTGSRQFERDLRRFARHERKMLLDNHALYDKTKKIFLPAKTEEDIFAHLGLDYIPPWQRNA

SEQ ID NO: 293 - protein, 354 aa, Artificial Sequence; identical to SEQ ID NO: 190
  Modified TdT Sequences

SEQ ID NO: 294 - protein, 354 aa, Artificial Sequence
  Modified TdT Sequences
TVSQYACQRRTTMENHNQIFTDAFAILAENAEFNESEGPCLAFRRAASLLKSLPHAISSSKDLEGLPCLGDQTKAVIQDILEYGQCSKVQDVLCDDRYQTIKLFTSVFGVGLKTAEKWYRKGFHSLEEVQADNAIHFTKMQKAGFLYYDDINAAVCKAEAQAIGQIVEETVRLIAPDAIVTLTGGFRRGKECGHDVDFLITTPEMGKEQLLPKVINLWEKKGLLLYYDLVESTFDKTRLPCRKFEAMDHFQKCFAIIKLKKELAAGRVQKDWKAIRVDFVAPPVDNFAFALLGWTGSRQFERDLRRFARHERKMLLDNHALYDKTKKIFLPAKTEEDIFAHLGLDYIPPWQRNA

SEQ ID NO: 295 - protein, 354 aa, Artificial Sequence
  Modified TdT Sequences
TVSQYACQRRTTMENHNQIFTDAFAILAENAEFNESEGPCLAFRRAASLLKSLPHAISSSKDLEGLPCLGDQTKAVIEDILEYGQCSKVQDVLCDDRYQTIKLFTSVFGVGLKTAEKWYRKGFHSLEEVQADNAIHFTKMQRAGFLYYDDISAAVCKAEADAIGQIVEETVRLIAPDAIVTLTGGFRRGKECGHDVDFLITSPEMGKEQLLPKVINLWEKKGLLLYYDLVESTFDKTRLPCRKFEAMDHFQKCFAIIKLKKELAAGRVQKDWKAIRVDFVAPPVDNFAFALLGWTGSRQFERDLRRFARHERKMLLDNHALYDKTKKIFLPAKTEEDIFAHLGLDYIPPWQRNA

SEQ ID NO: 296 - protein, 354 aa, Artificial Sequence; identical to SEQ ID NO: 190
  Modified TdT Sequences

SEQ ID NO: 297 - protein, 354 aa, Artificial Sequence
  Modified TdT Sequences
TVSQYACQRRTTMENHNQIFTDAFAILAENAEFNESEGPCLAFRRAASLLKSLPHAISSSKDLEGLPCLGDQTKAVIEDILEYGQCSKVQDVLCDDRYQSIKLFTSVFGVGLKTAEKWYRKGFHSLEEVQADNAIHFTKMQKAGFLYYDDISAAVCKAEADAIGQIVEETVRLIAPDAIVTLTGGFRRGKECGHDVDFLITTPEMGKEQLLPKVINLWEKKGLLLYYDLVESTFDKTRLPCRKFEAMDHFQKCFAIIKLKKELAAGRVQKDWKAIRVDFVVPPVDNFAFALLGWTGSRQFERDLRRFARHERKMLLDNHALYDKTKKIFLPAKTEEDIFAHLGLDYIPPWQRNA

SEQ ID NO: 298 - protein, 354 aa, Artificial Sequence
  Modified TdT Sequences
TVSQYACQRRTTMENHNQIFTDAFAILAENAEFNESEGPCLAFRRAASLLKSLPHAISSSKDLEGLPCLGDQTKRVIEDILEYGQCSKVQDVLCDDRYQTIKLFTSVFGVGLKTAEKWYRKGFHSLEEVKADNAIHFTKMQKAGFLYYDDISAAVCKAEADAIGQIVEETVRLIAPDAIVTLTGGFRRGKECGHDVDFLITTPEMGKEQLLPKVINLWEKKGLLLYYDLVESTFDKTRLPCRKFEAMDHFQKCFAIIKLKKELAAGRVQKDWKAIRVDFVAPPVDNFAFALLGWTGSRQFERDLRRFARHERKMLLDNHALYDKTKKIFLPAKTEEDIFAHLGLDYIDPWQRNA

SEQ ID NO: 299 - protein, 354 aa, Artificial Sequence; identical to SEQ ID NO: 271
  Modified TdT Sequences

SEQ ID NO: 300 - protein, 354 aa, Artificial Sequence
  Modified TdT Sequences
TVSQYACQRRTTMENHNQIFTDAFAILAENAEFNESEGPCLAFRRAASLLKSLPHAISSSKDLEGLPCLGDQTKAVIEDILEYGQCSKVQDVLCDDRYQTIKLFTSVFGVGLKTAEKWYRKGFHSLEEVQADNSIHFTKMQKAGFLYYDDISAAVCKAEADAIGQIVEETVRLIAPDAIVTLTGGFRRGKECGHDVDFLITTPEMGKEQLLPKVINLWEKKGLLLYYDLVESTFDKTRLPCRKFEAMDHFQKCFAIIKLKKELAAGRVQKDWKAIRVDFVAPPYDNFAFALLGWTGSRQFERDLRRFARHERKMLLDNHALYDKTKKIFLPAKTEEDIFAHLGLDYIPPWQRNA

SEQ ID NO: 301 - protein, 354 aa, Artificial Sequence
  Modified TdT Sequences
TVSQYACQRRTTMENHNQIFTDAFAILAENAEFNESEGPCLAFRRAASLLKSLPHPISSSKDLEGLPCLGDQTKAVIEDILEYGQCSKVQDVLCDDRYQTIKLFTSVFGVGLKTAEKWYRKGFHSLEEVQADNSIHFTKMQKAGFLYYDDISAAVCKAEADAIGQIVEETVRLIAPDAIVTLTGGFRRGKECGHDVDFLITTPEMGKEQLLPKVINLWEKKGLLLYYDLVESTFDKTRLPCRKFEAMDHFQKCFAIIKLKKELAAGRVQKDWKAIRVDFVACPVDNFAFALLGWTGSRQFERDLRRFARHERKMLLDNHALYDKTKKIFLPAKTEEDIFAHLGLDYIPPWQRNA

SEQ ID NO: 302 - protein, 354 aa, Artificial Sequence
  Modified TdT Sequences
TVSQYACQRRTTMENHNQIFTDAFAILAENAEFNESEGPCLAFRRAASLLKSLPHAISSSKDLEGLPCLGDQTSAVIEDILEYGQCSKVQDVLCDDRYQTIKLFTSVFGVGLKTAEKWYRKGFHSLEEVQADNAIHFTKMQKAGFLYYDDISAAVCKAEAQAIGQIVEETVRLIAPDAIVTLTGGFRRGKECGHDVDFLITSPEMGKEQLLPKVINLWEKKGLLLYYDLVESTFDKTRLPCRKFEAMDHFQKCFAIIKLKKELAAGRVQKDWKAIRVDFVVPPVDNFAFALLGWTGSRQFERDLRRFARHERKMLLDNHALYDKTKKIFLPAKTEEDIFAHLGLDYIPPWQRNA

SEQ ID NO: 303 - protein, 354 aa, Artificial Sequence
  Modified TdT Sequences
TVSQYACQRRTTMENHNQIFTDAFAILAENAEFNESEGPCLAFRRAASLLKSLPHAISSSKDLEGLPCLGDQTKAVIQDILEYGQCSKVQDVLCDDRYQTIKLFTSVFGVGLKTAEKWYRKGFHSLEEVQADNAIHFTKMQKAGFLYYDDISAAVCKAEADAIGQIVEETVRLIAPDAIVTLTGGFRRGKECGHDVDFLITTPEMGKEQLLPKVINLWEKKGLLLYYDLVESTFDKTRLPCRKFEAMDHFQKCFAIIKLKKELAAGRVQKDWKAIRVDFVACPVDNFAFALLGWTGSRQFERDLRRFARHERKMLLDNHALYDKTKKIFLPAKTEEDIFAHLGLDYIPPWQRNA

SEQ ID NO: 304 - protein, 354 aa, Artificial Sequence
  Modified TdT Sequences
TVSQYACQRRTTMENHNQIFTDAFAILAENAEFNESEGPCVAFRRAASLLKSLPHAISSSKDLEGLPCLGDQTKAVIEDILEYGQCSKVQDVLCDDRYQTIKLFTSVFGVGLKTAEKWYRKGFHSLEEVQADKAIHFTKMQKAGFLYYDDISAAVCKAEADAIGQIVEETVRLIAPDAIVTLTGGFRRGKECGHDVDFLITTPEMGKEQLLPKVINLWEKKGLLLYYDLVESTFDKTRLPCRKFEAMDHFQKCFAIIKLKKELAAGRVQKDWKAIRVDFVMPPVDNFAFALLGWTGSRQFERDLRRFARHERKMLLDNHALYDKTKKIFLPAKTEEDIFAHLGLDYIPPWQRNA

SEQ ID NO: 305 - protein, 354 aa, Artificial Sequence
  Modified TdT Sequences
TVSQYACQRRTTMENHNRIFTDAFAILAENAEFNESEGPCLAFRRAASLLKSLPHAISSSKDLEGLPCLGDQTKAVIEDILEYGQCSKVQDVLCDDRYQTIKLFTSVFGVGLKTAEKWYRKGFHSLEEVQADKAIHFTKMQKAGFLYYDDISAAVCKAEADAIGQIVEETVRLIAPDAIVTLTGGFRRGKECGHDVDFLITTPEMGKEQLLPKVINLWEKKGLLLYYDLVESTFDKTRLPCRKFEAMDHFQKCFAIIKLKKELAAGRVQKDWKAIRVDFVACPVDNFAFALLGWTGSRQFERDLRRFARHERKMLLDNHALYDKTKKIFLPAKTEEDIFAHLGLDYIPPWQRNA

SEQ ID NO: 306 - protein, 354 aa, Artificial Sequence
  Modified TdT Sequences
TVSQYACQRRTTMENHNQIFTDAFAVLAENAEFNESEGPCLAFRRAASLLKSLPHAISSSKDLEGLPCLGDQTKAVIEDILEYGQCSKVQDVLCDDRYQTIKLFTSVFGVGLKTAEKWYRKGFHTLEEVQADNAIHFTKMQKAGFLYYDDISAAVCKAEAQAIGQIVEETVRLIAPDAIVTLTGGFRRGKECGHDVDFLITTPEMGKEQLLPKVINLWEKKGLLLYYDLVESTFDKTRLPCRKFEAMDHFQKCFAIIKLKKELAAGRVQKDWKAIRVDFVAPPVDNFAFALLGWTGSRQFERDLRRFARHERKMLLDNHALYDKTKKIFLPAKTEEDIFAHLGLDYIPPWQRNA

SEQ ID NO: 307 - protein, 354 aa, Artificial Sequence
  Modified TdT Sequences
TVSQYACQRRTTMENHNQIFTDAFAILAENAEFNESEGPCLAFRRAASLLKSLPHAISSSKDLEGLPCLGDQTKAVIEDILEYGQCSKVQDVLCDDRYQTIKLFTSVFGVGLKTAEKWYRKGFHSLEEVQADNAIHFTKMQKAGFLYYDDISAAVCKAEADAIGQIVEETVRLIAPDAIVTLTGGFRRGKECGHDVDFLITTPEMGKEQLLPKVINLWEKKGLLLYYDLVESTFDKTRLPCRKFEAMDHFQKCFAIIKLKKELAAGRVQKDWKAIRVDFVACPVDNFAFALLGWTGSRQFERDLRRWARHERKMILDNHALYDKTKKIFLPAKTEEDIFAHLGLDYIPPWQRNA

SEQ ID NO: 308 - protein, 354 aa, Artificial Sequence
  Modified TdT Sequences
TVSQYACQRRTTMENHNQIFTDAFAILAENAEFNESEGPCLAFRRAASLLKSLPHAISSSKDLEGLPCLGDQTKAVIEDILEYGQCSKVQDVLCDDRYQTIKLFTSVFGVGLKTAEKWYRKGFHSLEEVQADKAIHFTKMQKAGFLYYDDISAAVCKAEADAIGQIVEETVRLIAPDAIVTLTGGFRRGKNCGHDVDFLITTPEMGKEQLLPKVINLWEKKGLLLYYDLVESTFDKTRLPCRKFEAMDHFQKCFAIIKLKKELAAGRVQKDWKAIRVDFVMPPVDNFAFALLGWTGSRQFERDLRRFARHERKMLLDNHALYDKTKKIFLPAKTEEDIFAHLGLDYIPPWQRNA

SEQ ID NO: 309 - protein, 354 aa, Artificial Sequence; identical to SEQ ID NO: 222
  Modified TdT Sequences

SEQ ID NO: 310 - protein, 354 aa, Artificial Sequence
  Modified TdT Sequences
TVSQYACQRRTTMENHNQIFTDAFAILAENAEFNESEGPCLAFRRAASLLKSLPHAISSSKDLEGLPCLGDQTKAVIEDILEYGQCSKVQDVLCDDRYQSIKLFTSVFGVGLKTAEKWYRKGFHSLEEVQADNAIHFTKMQKAGFLYYDDISAAVCKAEADAIGQIVEETVRLIAPDAIVTLTGGFRRGKECGHDVDFLITTPEMGKEQLLPKVINLWEKKGLLLYYDLVESTFDKTRLPCRKFEAMDHFQKCFAIIKLKKELAAGRVQKDWKAIRVDFVAPPVDNFAFALLGWTGSRQFERDLRRFARHERKMLLDNHALYDKTKKIFLPAKTEEDIFAHLGLDYIPPWQRNA

SEQ ID NO: 311 - protein, 354 aa, Artificial Sequence
  Modified TdT Sequences
TVSQYACQRRTTMENCNQIFTDAFAILAENAEFNESEGPCLAFRRAASLLKSLPHAISSSKDLEGLPCLGDQTKAVIEDILEYGQCSKVQDVLCDDRYQTIKLFTSVFGVGLKTAEKWYRKGFHSLEEVQADKAIHFTKMQKAGFLYYDDISAAVCKAEADAIGQIVEETVRLIAPDAIVTLTGGFRRGKECGHDVDFLITTPEMGKEQLLPKVINLWEKKGLLLYYDLVESTFDKTRLPCRKFEAMDHFQKCFAIIKLKKERAAGRVQKDWKAIRVDFVMPPVDNFAFALLGWTGSRQFERDLRRFARHERKMLLDNHALYDKTKKIFLPAKTEEDIFAHLGLDYIPPWQRNA

SEQ ID NO: 312 - protein, 354 aa, Artificial Sequence
  Modified TdT Sequences
TVSPYACQRRTTMENHNQIFTDAFAILAENAEFNESEGPCLAFRRAASLLKSLPHAISSSKDLEGLPCLGDQTKAVIEDILEYGQCSKVQDVLCDDRYQTIKLFTSVFGVGLKTAEKWYRKGFHSLEEVQADKAIHFTKMQKAGFLYYDDISAAVCKAEADAIGQIVEETVRLIAPDAIVTLTGGFRRGKECGHDVDFLITTPEMGKEQLLPKVINLWEKKGLLLYYDLVESTFDKTRLPCRKFEAMDHFQKCFAIIKLKKELAAGRVQKDWKAIRVDFVMCPVDNFAFALLGWTGSRQFERDLRRFARHERKMLLDNHALYDKTKKIFLPAKTEEDIFAHLGLDYIPPWQRNA

SEQ ID NO: 313 - protein, 354 aa, Artificial Sequence
  Modified TdT Sequences
TVSQYACQRRTTMENHNQIFTDAFAILAENAEFNESEGPCLAFRRAASLLKSLPHAISSSKDLEGLPCLGDQTKAVIEDILEYGQCSKVQDVLCDDRYQTIKLFTSVFGVGLKTAEKWYRKGFHSLEEVQADNAIHFTKMQKAGFLYYDDISAAVCKAEADAIGQIVEEAVRLIAPDAIVTLTGGFRRGKECGHDVDFLITTPEMGKEQLLPKVINLWEKKGLLLYYDLVESTFDKTRLPCRKFEAMDHFQKCFAIIKLKKELAAGRVQKDWKAIRVDFVACPVDNFAFALLGWTGSRQFERDLRRFARHERKMLLDNHALYDKTKKIFLPAKTEEDIFAHLGLDYIPPWQRNA

SEQ ID NO: 314 - protein, 354 aa, Artificial Sequence
  Modified TdT Sequences
TVSQYACQRRTTMENHNRIFTDAFAILAENAEFNESEGPCLAFRRAASLLKSLPHAISSSKDLEGLPCLGDQTKAVIEDILEYGQCSKVQDVLCDDRYQTIKLFTSVFGVGLKTAEKWYRKGFHSLEEVQADNAIHFTKMQKAGFLYYDDISAAVCKAEADAIGQIVEETVRLIAPDAIVTLTGGFRRGKECGHDVDFLITTPEMGKEQLLPKVINLWEKKGLLLYYDLVESTFDKTRLPCRKFEAMDHFQKCFAIIKLKKELAAGRVQKDWKAIRVDFVMPPVDNFAFALLGWTGSRQFERDLRRFARHERKMLLDNHALYDKTKKIFLPAKTEEDIFAHLGLDYIPPWQRNA

SEQ ID NO: 315 - protein, 354 aa, Artificial Sequence; identical to SEQ ID NO: 312
  Modified TdT Sequences

SEQ ID NO: 316 - protein, 354 aa, Artificial Sequence
  Modified TdT Sequences
TVSQYACQRRTTMENHNQIFTDAFAILAENAEFNESEGPCLAFRRAASLLKSLPHPISSSKDLEGLPCLGDQTKAVIEDILEYGQCSKVQDVLCDDRYQTIKLFTSVFGVGLKTAEKWYRKGFHSLEEVKADNAIHFTKMQKAGFLYYDDISAAVCKAEADAIGQIVEETVRLIAPDAIVTLTGGFRRGKECGHDVDFLITTPEMGKEQLLPKVINLWEKKGLLLYYDLVESTFDKTRLPCRKFEAMDHFQKCFAIIKLKKELAAGRVQKDWKAIRVDFVAPPVDNFAFALLGWTGSRQFERDLRRFARHERKMLLDNHALYDKTKKIFLPAKTEEDIFAHLGLDYIPPWQRNA

SEQ ID NO: 317 - protein, 354 aa, Artificial Sequence
  Modified TdT Sequences
TVSQYACQRRTTMENHNQIFTDAFAILAENAEFNESEGPCLAFRRAASLLKSLPHAISSSKDLEGLPCLGDQTSAVIEDILEYGQCSKVQDVLCDDRYQTIKLFTSVFGVGLKTAEKWYRKGFHSLEEVQADNAIHFTKMQKAGFLYYDDISAAVCKAEADAIGQIVEETVRLIAPDAIVTLTGGFRRGKECGHDVDFLITTPQMGKEQLLPKVINLWEKKGLLLYYDLVESTFDKTRLPCRKFEAMDHFQKCFAIIKLKKELAAGRVQKDWKAIRVDFVAPPVDNFAFALLGWTGSRQFERDLRRFARHERKMLLDNHALYDKTKKIFLPAKTEEDIFAHLGLDYIPPWQRNA

SEQ ID NO: 318 - protein, 354 aa, Artificial Sequence
  Modified TdT Sequences
TVSQYACQRRTTMENHNQIFTDAFAILAENAEFNESEGPCLAFRRAASLLKSLPHAISSSKDLEGLPCLGDQTKAVIEDILEYGQCSKVQDVLCDDRYQTIKLFTSVFGVGLKTAEKWYRKGFHSLEEVKADNAIHFTKMQKAGFLYYDDISAAVCKAEADAIGQIVEETVRLIAPDAIVTLTGGFRRGKECGHDVDFLITTPEMGKEQLLPKVINLWEKKGLLLYYDLVESTFDKTRLPCRKFEAMDHFQKCFAIIKLKKELAAGRVQKDWKAIRVDFVAAPVDNFAFALLGWTGSRQFERDLRRFARHERKMLLDNHALYDKTKKIFLPAKTEEDIFAHLGLDYIPPWQRNA

SEQ ID NO: 319 - protein, 354 aa, Artificial Sequence
  Modified TdT Sequences
TVSQYACQRRTTMENHNQIFTDAFAILAENAEFNESEGPCLAFRRAASLLKSLPHAISSSKDLEGLPCLGDQTKAVIEDILEYGQCSKVQDVLCDDRYQTIKLFTSVFGVGLKTAEKWYRKGLHSLEEVQADNAIHFTKMQRAGFLYYDDISAAVCKAEADAIGQIVEETVRLIAPDAIVTLTGGFRRGKECGHDVDFLITTPEMGKEQLLPKVINLWEKKGLLLYYDLVESTFDKTRLPCRKFEAMDHFQKCFAIIKLKKELAAGRVQKDWKAIRVDFVACPVDNFAFALLGWTGSRQFERDLRRFARHERKMLLDNHALYDKTKKIFLPAKTEEDIFAHLGLDYIPPWQRNA

SEQ ID NO: 320 - protein, 354 aa, Artificial Sequence
  Modified TdT Sequences
TVSQYACQRRTTMENHNQIFTDAFAILAENAEFNESEGPCLAFRRAASLLKSLPHAISSSKDLEGLPCLGDQTKAVIEDILEYGQCSKVQDVLCDDRYQTIKLFTSVFGVGLKTAEKWYRKGFHSLEEVQADKAIHFTKMQKAGFLYYDDISAAVCRAEADAIGQIVEETVRLIAPDAIVTLTGGFRRGKECGHDVDFLITTPEMGKEQLLPKVINLWEKKGLLLYYDLVESTFDKTRLPCRKFEAMDHFQKCFAIIKLKKELAAGRVQKDWKAIRVDFVMCPVDNFAFALLGWTGSRQFERDLRRFARHERKMLLDNHALYDKTKKIFLPAKTEEDIFAHLGLDYIPPWQRNA

SEQ ID NO: 321 - protein, 354 aa, Artificial Sequence
  Modified TdT Sequences
TVSQYACQRRTTMENHNQIFTDAFAILAENAEFNESEGPCLAFRRAASLLKSLPHAISSSKDLEGLPCLGDQTKAVIEDILEYGQCSKVQDVLCDDRYQTIKLFTSVFGVGLKTAEKWYRKGFHSLEEVQADNAIHFTKMQKAGFLYYDDISAAVCKAEADAIGQIVEETVRLIAPDAIVTLTGGFRRGKECGHDVDFLITSPEMGKEQLLPKVINLWEKKGLLLYYDLVESTFDKTRLPCRKFEAMDHFQKCFAIIKLKKELAAGRVQKDWKAIRVDFVACPVDNFAFALLGWTGSRQFERDLRRFARHEKKMLLDNHALYDKTKKIFLPAKTEEDIFAHLGLDYIPPWQRNA

SEQ ID NO: 322 - protein, 354 aa, Artificial Sequence
  Modified TdT Sequences
TVSQYACQRRTTMENHNQIFTDAFAILAENAEFNESEGPCLAFMRAASLLKSLPHAISSSKDLEGLPCLGDQTKAVIEDILEYGQCSKVQDVLCDDRYQTIKLFTSVFGVGLKTAEKWYRKGFHSLEEVQADNAIHFTKMQKAGFLYYDDISAAVCKAEADAIGQIVEETVRLIAPDAIVTLTGGFRRGKECGHDVDFLITTPEMGKEQLLPKVINLWEKKGLLLYYDLVESTFDKTRLPCRKFEAMDHFQKCFAIIKLKKELAAGRVQKDWKAIRVDFVMPPVDNFAFALLGWTGSRQFERDLRRFARHERKMLLDNHALYDKTKKIFLPAKTEEDIFAHLGLDYIPPWQRNA

SEQ ID NO: 323 - protein, 354 aa, Artificial Sequence
  Modified TdT Sequences
TVSQYACQRRTTMENHNQIFTDAFAILAENAEFNESEGPCLAFRRAASLLKSLPHAISSSKDLEGLPCLGDQTKAVIQDILEYGQCSKVQDVLCDDRYQTIKLFTSVFGVGLKTAEKWYRKGFHSLEEVQADNAIHFTKMQKAGFLYYDDISAAVCKAEADAIGQIVEETVRLIAPDAIVTLTGGFRRGKECGHDVDFLITTPEMGKEQLLPKVINLWEKKGLLLYYDLVESTFDKTRLPCRKFEAMDAFQKCFAIIKLKKELAAGRVQKDWKAIRVDFVAPPVDNFAFALLGWTGSRQFERDLRRFARHERKMLLDNHALYDKTKKIFLPAKTEEDIFAHLGLDYIPPWQRNA

SEQ ID NO: 324 - protein, 354 aa, Artificial Sequence
  Modified TdT Sequences
TVSQYACQRRTTMENHNQIFTDAFAILAENAEFNESEGPCLAFRRAASLLKSLPHPISSSKDLEGLPCLGDQTKAVIEDILEYGQCSKVQDVLCDDRYQTIKLFTSVFGVGLKTAEKWYRKGFHSLEEVQADNAIHFTKMQKAGFLYYDDISAAVCKAEADAIGQIVEETVRLIAPDAIVTLTGGFRRGKECGHDVDFLITTPEMGKEQLLPKVINLWEKKGLLLYYDLVESTFDKTRLPCRKFEAMDAFQKCFAIIKLKKELAAGRVQKDWKAIRVDFVAPPVDNFAFALLGWTGSRQFERDLRRFARHERKMLLDNHALYDKTKKIFLPAKTEEDIFAHLGLDYIDPWQRNA

SEQ ID NO: 325 - protein, 354 aa, Artificial Sequence
  Modified TdT Sequences
TVSQYACQRRTTMENHNQIFTDAFAILAENAEFNESEGPCLAFRRAASLLKSLPHAISSSRDLEGLPCLGDQTKAVIEDILEYGQCSKVQDVLCDDRYQTIKLFTSVFGVGLKTAEKWYRKGFHSLEEVQADKAIHFTKMQRAGFLYYDDISAAVCKAEADAIGQIVEETVRLIAPDAIVTLTGGFRRGKECGHDVDFLITTPEMGKEQLLPKVINLWEKKGLLLYYDLVESTFDKTRLPCRKFEAMDHFQKCFAIIKLKKELAAGRVQKDWKAIRVDFVMCPVDNFAFALLGWTGSRQFERDLRRFARHERKMLLDNHALYDKTKKIFLPAKTEEDIFAHLGLDYIPPWQRNA

SEQ ID NO: 326 - protein, 354 aa, Artificial Sequence
  Modified TdT Sequences
TVSQYACQRRTTMENHNQIFTDAFAILAENAEFNESEGPCLAFRRAASLLKSLPHAISSSKDLEGLPCLGDQTKAVIEDILEYGQCSKVQDVLCDDRYQSIKLFTSVFGVGLKTAEKWYRKGFHSLEEVQADNAIHFTKMQKAGFLYYDDISAAVCKAEADAIGQIVEETVRLIAPDAIVTLTGGFRRGKECGHDVDFLITTPQMGKEQLLPKVINLWEKKGLLLYYDLVESTFDKTRLPCRKFEAMDHFQKCFAIIKLKKELAAGRVQKDWKAIRVDFVAPPVDNFAFALLGWTGSRQFERDLRRFARHERKMLLDNHALYDKTKKIFLPAKTEEDIFAHLGLDYIPPWQRNA

SEQ ID NO: 327 - protein, 354 aa, Artificial Sequence
  Modified TdT Sequences
TVSQYACQRRTTMENHNQIFTDAFAILAENAEFNESEGPCLAFRRAASLLKSLPHAISSSKDLEGLPCLGDQTKAVIEDILEYGQCSKVQDVLCDDRYQTIKLFTSVFGVGLKTAEKWYRKGFHSLEEVQADNAIHFTKMQKAGFLYYDDISAAVCKAEADAIGQIVEEAVRLIAPDAIVTLTGGFRRGKECGHDVDFLITTPEMGKEQLLPKVINLWEKKGLLLYYDLVESTFDKTRLPCRKFEAMDHFQKCFAIIKLKKELAAGRVQKDWKAIRVDFVAPPVDNFAFALLGWTGSRQFERDLRRFARHERKMLLDNHALYDKTKKIFLPAKTEEDIFAHLGLDYIPPWQRNA

SEQ ID NO: 328 - protein, 354 aa, Artificial Sequence
  Modified TdT Sequences
TVSQYACQRRTTMENHNKIFTDAFAILAENAEFNESEGPCLAFRRAASLLKSLPHAISSSKDLEGLPCLGDQTKRVIEDILEYGQCSKVQDVLCDDRYQTIKLFTSVFGVGLKTAEKWYRKGFHSLEEVQADNAIHFTKMQKAGFLYYDDISAAVCKAEADAIGQIVEETVRLIAPDAIVTLTGGFRRGKECGHDVDFLITTPEMGKEQLLPKVINLWEKKGLLLYYDLVESTFDKTRLPCRKFEAMDHFQKCFAIIKLKKELAAGRVQKDWKAIRVDFVAPPYDNFAFALLGWTGSRQFERDLRRFARHERKMLLDNHALYDKTKKIFLPAKTEEDIFAHLGLDYIPPWQRNA

SEQ ID NO: 329 - protein, 354 aa, Artificial Sequence
  Modified TdT Sequences
TVSQYACQRRTTMENHNQIFTDAFAILAENAEFNESEGPCVAFRRAASLLKSLPHAISSSKDLEGLPCLGDQTKAVIEDILEYGQCSKVQDVLCDDRYQTIKLFTSVFGVGLKTAEKWYRKGFHSLEEVQADKAIHFTKMQKAGFLYYDDISAAVCKAEADAIGQIVEETVRLIAPDAIVTLTGGFRRGKNCGHDVDFLITTPEMGKEQLLPKVINLWEKKGLLLYYDLVESTFDKTRLPCRKFEAMDHFQKCFAIIKLKKELAAGRVQKDWKAIRVDFVMAPVDNFAFALLGWTGSRQFERDLRRFARHERKMLLDNHALYDKTKKIFLPAKTEEDIFAHLGLDYIPPWQRNA

SEQ ID NO: 330 - protein, 354 aa, Artificial Sequence; identical to SEQ ID NO: 283
  Modified TdT Sequences

SEQ ID NO: 331 - protein, 354 aa, Artificial Sequence
  Modified TdT Sequences
TVSQYACQRRTTMENHNQIFTDAFAILAENAEFNESEGPCLAFRRAASLLKSLPHAISSSKDLEGLPCLGDQTKAVIEDILEYGQCSKVQDVLCDDRYQTIKLFTSVFGVGLKTAEKWYRKGFHSLEEVQADNAIHFTKMQKAGFLYYDDISAAVCKAEAQAIGQIVEETVRLIAPDAIVTLTGGFRRGKECGHDVDFLITTPEMGKEQLLPKVINLWEKKGLLLYYDLVESTFDKTRLPCRKFEAMDHFQKCFAIIKLKKELAAGRVQKDWKAIRVDFVMPPVDNFAFALLGWTGSRQFERDLRRFARHERKMLLDNHALYDKTKKIFLPAKTEEDIFAHLGLDYIPPWQRNA

SEQ ID NO: 332 - protein, 354 aa, Artificial Sequence
  Modified TdT Sequences
TVSQYACQRRTTMENHNQIFTDAFAILAENAEFNESEGPCLAFRRAASLLKSLPHAISSSKDLEGLPCLGDQTKAVIEDILEYGQCSKVQDVLCDDRYQTIKLFTSVFGVGLKTAEKWYRKGFHSLEEVQADNAIHFTKMQKAGFLYYDDISAAVCKAEAQAIGQIVEETVRLIAPDAIVTLTGGFRRGKECGHDVDFLITTPEMGKEQLLPKVINLWEKKGLLLYYDLVESTFDKTRLPCRKFEAMDHFQKCFAIIKLKKELAAGRVQKDWKAIRVDFVAPPVDNFAFALLGWTGSRQFERDLRRFARHERKMLLDNHALYDKTKKIFLPAKTEEDIFAHLGLDYIDPWQRNA

SEQ ID NO: 333 - protein, 354 aa, Artificial Sequence
  Modified TdT Sequences
TVSQYACQRRTTMENHNQIFTDAFAILAENAEFNESEGPCLAFRRAASLLKSLPHAISSSRDLEGLPCLGDQTKAVIEDILEYGQCSKVQDVLCDDRYQTIKLFTSVFGVGLKTAEKWYRKGFHSLEEVQADKAIHFTKMQKAGFLYYDDISAAVCKAEADAIGQIVEETVRLIAPDAIVTLTGGFRRGKECGHDVDFLITTPEMGKEQLLPKVINLWEKKGLLLYYDLVESTFDKTRLPCRKFEAMDHFQKCFAIIKLKKELAAGRVQKDWKAIRVDFVMAPVDNFAFALLGWTGSKQFERDLRRFARHERKMLLDNHALYDKTKKIFLPAKTEEDIFAHLGLDYIPPWQRNA

SEQ ID NO: 334 - protein, 354 aa, Artificial Sequence
  Modified TdT Sequences
TVSQYACQRRTTMENHNQIFTDAFAILAENAEFNESEGPCLAFRRAASLLKSLPHAISSSKDLEGLPCLGDQTKAVIEDILEYGQCSKVQDVLCDDRYQTIKLFTSVFGVGLKTAEKWYRKGFHSLEEVKADKAIHFTKMQKAGFLYYDDISAAVCKAEADAIGQIVEETVRLIAPDAIVTLTGGFRRGKECGHDVDFLITTPEMGKEQLLPKVINLWEKKGLLLYYDLVESTFDKTRLPCRKFEAMDHFQKCFAIIKLKKELAAGRVQKDWKAIRVDFVAPPVDNFAFALLGWTGSRQFERDLRRFARHERKMLLDNHALYDKTKKIFLPAKTEEDIFAHLGLDYIPPWQRNA

SEQ ID NO: 335 - protein, 354 aa, Artificial Sequence
  Modified TdT Sequences
TVSQYACQRRTTMENHNQIFTDAFAILAENAEFNESEGPCLAFRRAASLLKSLPHAISSSKDLEGLPCLGDQSKAVIEDILEYGQCSKVQDVLCDDRYQTIKLFTSVFGVGLKTAEKWYRKGFHTLEEVQADNAIHFTKMQKAGFLYYDDISAAVCKAEADAIGQIVEETVRLIAPDAIVTLTGGFRRGKECGHDVDFLITTPEMGKEQLLPKVINLWEKKGLLLYYDLVESTFDKTRLPCRKFEAMDHFQKCFAIIKLKKELAAGRVQKDWKAIRVDFVAPPVDNFAFALLGWTGSRQFERDLRRFARHERKMLLDNHALYDKTKKIFLPAKTEEDIFAHLGLDYIPPWQRNA

SEQ ID NO: 336 - protein, 354 aa, Artificial Sequence
  Modified TdT Sequences
TVSQYACQRRTTMENHNKIFTDAFAILAENAEFNESEGPCLAFRRAASLLKSLPHAISSSKDLEGLPCLGDQTKAVIEDILEYGQCSKVQDVLCDDRYQTIKLFTSVFGVGLKTAEKWYRKGFHSLEEVKADNAIHFTKMQKAGFLYYDDISAAVCKAEADAIGQIVEEAVRLIAPDAIVTLTGGFRRGKECGHDVDFLITTPEMGKEQLLPKVINLWEKKGLLLYYDLVESTFDKTRLPCRKFEAMDHFQKCFAIIKLKKELAAGRVQKDWKAIRVDFVAPPVDNFAFALLGWTGSRQFERDLRRFARHERKMLLDNHALYDKTKKIFLPAKTEEDIFAHLGLDYIPPWQRNA

SEQ ID NO: 337 - protein, 354 aa, Artificial Sequence
  Modified TdT Sequences
TVSQYACQRRTTMENHNQIFTDAFAILAENAEFNESEGPCLAFRRAASLLKSLPHAISSSKDLEGLPCLGDQSKAVIEDILEYGQCSKVQDVLCDDRYQTIKLFTSVFGVGLKTAEKWYRKGFHSLEEVQADNAIHFTKMQKAGFLYYDDINAAVCKAEADAIGQIVEETVRLIAPDAIVTLTGGFRRGKECGHDVDFLITTPEMGKEQLLPKVINLWEKKGLLLYYDLVESTFDKTRLPCRKFEAMDHFQKCFAIIKLKKELAAGRVQKDWKAIRVDFVAPPVDNFAFALLGWTGSRQFERDLRRFARHERKMLLDNHALYDKTKKIFLPAKTEEDIFAHLGLDYIPPWQRNA

SEQ ID NO: 338 - protein, 354 aa, Artificial Sequence; identical to SEQ ID NO: 271
  Modified TdT Sequences

SEQ ID NO: 339 - protein, 354 aa, Artificial Sequence; identical to SEQ ID NO: 327
  Modified TdT Sequences

SEQ ID NO: 340 - protein, 354 aa, Artificial Sequence
  Modified TdT Sequences
TVSQYACQRRTTMENHNKIFTDAFAILAENAEFNESEGPCLAFRRAASLLKSLPHAISSSKDLEGLPCLGDQTKAVIEDILEYGQCSKVQDVLCDDRYQTIKLFTSVFGVGLKTAEKWYRKGFHSLEEVQADNAIHFTKMQKAGFLYYDDISAAVCKAEADAIGQIVEETVRLIAPDAIVTLTGGFRRGKECGHDVDFLITTPEMGKEQLLPKVINLWEKKGLLLYYDLVESTFDKTRLPCRKFEAMDHFQKCFAIIKLKKELAAGRVQKDWKAIRVDFVACPVDNFAFALLGWTGSRQFERDLRRFARHERKMLLDNHALYDKTKKIFLPAKTEEDIFAHLGLDYIPPWQRNA

SEQ ID NO: 341 - protein, 354 aa, Artificial Sequence
  Modified TdT Sequences
TVSQYACQRRTTMENHNQIFTDAFAILAENAEFNESEGPCLEFRRAASLLKSLPHAISSSKDLEGLPCLGDQTKAVIEDILEYGQCSKVQDVLCDDRYQTIKLFTSVFGVGLKTAEKWYRKGFHSLEEVQADKAIHFTKMQKAGFLYYDDISAAVCKAEADAIGQIVEETVRLIAPDAIVTLTGGFRRGKECGHDVDFLITTPEMGKEQLLPKVINLWEKKGLLLYYDLVESTFDKTRLPCRKFEAMDHFQKCFAIIKLKKELAAGRVQKDWKAIRVDFVACPVDNFAFALLGWTGSRQFERDLRRFARHERKMLLDNHALYDKTKKIFLPAKTEEDIFAHLGLDYIPPWQRNA

SEQ ID NO: 342 - protein, 354 aa, Artificial Sequence
  Modified TdT Sequences
TVSQYACQRRTTMENHNQIFTDAFAILAENAEFNESEGPCLAFRRAASLLKSLPHAISSSKDLEGLPCLGDQTKRVIEDILEYGQCSKVQDVLCDDRYQTIKLFTSVFGVGLKTAEKWYRKGLHTLEEVQADNAIHFTKMQKAGFLYYDDISAAVCKAEADAIGQIVEETVRLIAPDAIVTLTGGFRRGKECGHDVDFLITTPEMGKEQLLPKVINLWEKKGLLLYYDLVESTFDKTRLPCRKFEAMDHFQKCFAIIKLKKELAAGRVQKDWKAIRVDFVAPPVDNFAFALLGWTGSRQFERDLRRFARHERKMLLDNHALYDKTKKIFLPAKTEEDIFAHLGLDYIPPWQRNA

SEQ ID NO: 343 - protein, 354 aa, Artificial Sequence
  Modified TdT Sequences
TVSQYACQRRTTMENHNRIFTDAFAILAENAEFNESEGPCLAFRRAASLLKSLPHAISSSKDLEGLPCLGDQTKAVIEDILEYGQCSKVQDVLCDDRYQTIKLFTSVFGVGLKTAEKWYRKGFHSLEEVQADKAIHFTKMQKAGFLYYDDISAAVCKAEADAIGQIVEETVRLIAPDAIVTLTGGFRRGKECGHDVDFLITTPEMGKEQLLPKVINLWEKKGLLLYYDLVESTFDKTRLPCRKFEAMDHFQKCFAIIKLKKELAAGRVQKDWKAIRVDFVACPVDNFAFALLGWTGSKQFERDLRRFARHERKMLLDNHALYDKTKKIFLPAKTEEDIFAHLGLDYIPPWQRNA

SEQ ID NO: 344 - protein, 362 aa, Artificial Sequence
  Modified TdT Sequence
MENLYFQGTVSQYACQRRTTMENHNQVFTDAFAILAENAEFNESEGPCLAFRRAASLLKSLPHAISSSKDLEGLPCLGDQTKAVIEDIFEYGQCSKVQDVLCDDRYQTIKLFTSVFGVGLKTAEKWYRKGFHSLEEVQADKAIHFTKMQKAGFLYYDDISAAVCKAEADAIGQIVEETVRLIAPDAIVTLTGGFRRGKEIGHDVDFLITTPEMGKEQLLPRVINLLEKKGLLLYYDLVESTFDKTRLPCRKFEAMDHFQKCFAIIKLKKELAAGRVQKDWKAIRVDFVMPPVDNFAFALLGWTGSRQFERDLRRFARHERKMLLDRHALYDKTKKIFLPAKTEEDIFAHLGLDYVPPWQRNA

SEQ ID NO: 345 - protein, 362 aa, Artificial Sequence
  Modified TdT Sequence
MENLYFQGTVSQYACQRRTTMENHNQIFTDAFAILAENAEFNESEGPALAFRRAASLLKSLPHAISSSKDLEGLPCLGDQTKAVIEDILEYGQCSKVQDVLCDDRYQTIKLFTSVFGVGLKTAEKWYRKGFHSLEEVQADKAIQFTKMQKAGFLYYDDISAAVCKAEADAIGCIVEETVRLIAPDAIVTLTGGFRRGKEIGHDVDFLITTPEAGKEQLLPKVIDLLEKKGLLLYYDLVESTFDKTRLPCRKFEAMDHFQKCFAIIKLKKELAAGRVQKDWKAIRVDFVMPPVDNFAFALLGWTGSRQFERDLRRFARHERKMLLDRHALYDKTKKIFLPAKTEEDIFAHLGLDYIPPWQRNA

SEQ ID NO: 346 - protein, 362 aa, Artificial Sequence
  Modified TdT Sequence
MENLYFQGTVSQYACQRRTTMENHNQIFTDAFAILAENAEFNESEGPCLAFRRAASLLKSLPHAISSSKDLEGLPCLGDQTKAVIEDIIEYGQCSKVQDVLCDDRYQTIKLFTSVFGVGLKTAEKWYRKGFHSLEDVQADKAIHFTKMQKAGFLYYDDISAAVCKAEADAIGQIVEETVRLIAPDAIVTLTGGFRRGKECGHDVDFLITTPEMGKEQLLPKVINLWEKKGLLLYYDLVESTFDKTRLPCRKFEAMDHFQKCFAIIKLKKELAAGRVQKDWKAIRVDFVMPPVDNFAFALLGWTGSRQFERDLRRFARHERKMLLDRHALYDRTKKIFLPAKTEEDIFAHLGLDYIPPWQRNA

SEQ ID NO: 347 - protein, 362 aa, Artificial Sequence
  Modified TdT Sequence
MENLYFQGTVSQYACQRRTTTENHNQIFTDAFAILAENAEFNESEGPALAFRRAASLLKSLPHAISSSKDLEGLPCLGDQTKAVIEDILEYGQCSKVQDVLCDDRYQTIKLFTSVFGVGLKTAEKWYRKGFHSLEEVQADKAIQFTKMQKAGFLYYDDISAAVCKAEADAIGQIVEETVRLIAPDAIVTLTGGFRRGKECGHDVDFLITTPEMGKEQLLPDVINLLEKKGLLLYYHLVESTFDKTRLPCRKFEAMDHFQKCFAIIKLKKELAAGRVQKDWKAIRVDFVMPPADNFAFALLGWTGSRQFERDLRRFARHERKMLLDRHALYDKTKKIFLPAKTEEDIFAHLGLDYIPPWQRNA

SEQ ID NO: 348 - protein, 362 aa, Artificial Sequence
  Modified TdT Sequence
MENLYFQGTVSQYACQRRTTMENHNQIFTDAFAILAENAEFNESEGPCLAFRRAASLLKSLPHAISSSKDLEGLPCLGDQTKAVIEDILEYGQCSKVQDVLCDDRYQTIKLFTSVFGVGLKTAEKWYRKGFHSLEEVQADKAIHFTKMQKAGFLYYDDISAAVCKAEADAIGQIVEETVRLIAPDAIVTLTGGFRRGKECGHDVDFLITTPEMGKEQLLPKVINLWEKKGLLLYYDLVESTFDKTRLPCRKFEAMDHFQKCFAIIKLKKELAAGRVQKDWKAIRVDFVLPPIDRFAFALLGWTGSRQFERDLRRFARHERKMLLDRHALYDKTKKIFLPAKTEEDIFAHLGLDYIPPWQRNA

SEQ ID NO: 349 - protein, 362 aa, Artificial Sequence
  Modified TdT Sequence
MENLYFQGTVSQYACQRRTTMENHNQIFTDAFAILAENAEFNESEGPCLAFRRAASLLKSLPHAISSSKDLEGLPCLGDQTKAVIEDILEYGQCSKVQDVLCDDRYQTIKLFTSVFGVGLKTAEKWYRKGFHSLEEVQADKAIHFTKMQKAGFLYYDDISAAVCKAEADAIGQIVEETVRLIAPDAIVTLTGGFRRGKECGHDVDFLITTPEMGKEQLLPKVINLWEKKGLLLYYDLVESTFDKTRLPCRKFEAMDHFQKCFAIIKLKKELAAGRVQKDWKAIRVDFVMPPVDNFAFALLGWTGSRQFERDLRRFARHERKMLLDRHALYDKTKKIFLPAKTEEDIFAHLGLDYIPPWQRNA

SEQ ID NO: 350 - protein, 362 aa, Artificial Sequence
  Modified TdT Sequence
MENLYFQGTVSQYACQRRTTMENHNQIFTDAFAILAENAEFNESEGPCLAFRRAASLLKSLPHAISSSKDLEGLPCLGDQTKAVIEDILEYGQCSKVQDVLCDDRYQTIKLFTSVFGVGLKTAEKWYRKGFHSLEEVQADKAIHFTKMQKAGFLYYDDITAAVCKAEADAIGQIVEETVRGIAPDAIVTLTGGFRRGKEIGHDVDFLITTPEMGKEQLLPRVINLLEKKGLLLYYDLVESTFDKTRLPCRKFEAMDHFQQCFAIIKLKKELAAGRVQKDWKAIRVDFVMPPVDNFAFALLGWTGSRQFERDLRRFARHERKMLLDRHALYDKTKKIFLPAKTEEDIFAHLGLDYIPPWQRNA

SEQ ID NO: 351 - protein, 362 aa, Artificial Sequence
  Modified TdT Sequence
MENLYFQGTVSQYACQRRTTMENHNQIFTDAFAILAENAEFNESEGPCLAFRRAASLLKSLPHAISSSKDLEGLPCLGDQTKAVIEDILEYGQCSKVQDVLCDDRYQTIKLFTSVFGVGLKTAEKWYRMGFHTLEEVQADKAIHFTKMQKAGFLYYDDISAAVCKAEADAIGQIVEETVRLIAPDAIVTLTGGFRRGKEIGHDVDFLITTPEMGKEQLLPRVINLLEKKGLLLYYDLVESTFDKTRLPCRKFEAMDHFQKCFAIIKLKKELAAGRVQKDWKAIRVDFVMPPVDNFAFALLGWTGSRQFERDLRRFARHERKMLLDRHALYDKTKRIFLPAKTEEDIFAHLGLDYIPPWQRNA

SEQ ID NO: 352 - protein, 362 aa, Artificial Sequence
  Modified TdT Sequence
MENLYFQGTVSQYACQRRTTMENHNQIFTDAFAILAENAEFNESEGPALAFRRAASLLKSLPHAISSSKDLEGLPCLGDQTKAVIEDILEYGQCSKVQDVLCDDRYQTIKLFTSVFGVGLKTAEKWYRKGFHSLEEVQADKAIQFTKMQKAGFLYYDDISAAVCKAEADAIGQIVEETVRLIAPDAIVTLTGGFRRGKECGHDVDFLITTPEMGKEQLLPDVINLLEKKGLLLYYDLVESTFDKTRLPCRKFEAMDHFQKCFAIIKLKKELAAGRVQKDWKAIRVDFVMPPIDNFAFALLGWTGSRQFERDLRRFARHERKMLLDRHALYDKTKKIFLPAKTEEDIFAHLGLDYIPPWQRNA

SEQ ID NO: 353 - protein, 362 aa, Artificial Sequence
  Modified TdT Sequence
MENLYFQGTVSQYACQRRTTMENHNQIFTDAFAILAENAEFNESEGPCVAFRRAASLLKSLPHAISSSKDLEGLPCLGDQTKAVIEDILEYGQCSKVQDVLCDDRYQTIKLFTSVFGVGLKTAEKWYRKGFHSLEEVQADKAIHFTKMQKAGFLYYDDISAAVCKAEADAIGQIVEETVRLIAPDAIVTLTGGFRRGKEIGHDVDFLITTPEMGREQLLPRLINLLEKKGLLLYYDLVESTFDKTRLPCRKFEAMDHFQKCFAIIKLKKELAAGRVQKDWKAIRVDFVMPPVDNFAFALLGWTGSRQFERDLRRFARHERKMLLDRHALYDKTKKIFLPAKTEEDIFAHLGLDYIPPWQRNA

SEQ ID NO: 354 - protein, 362 aa, Artificial Sequence
  Modified TdT Sequence
MENLYFQGTVSQYACQRRTTMENHNQIFTDAFAILAENAEFNESEGPAVAFRRAASLLKSLPHAISSSKDLEGLPCLGDQTKAVIEDILEYGQCSKVQDVLCDDRYQTIKLFTSVFGVGLKTAEKWYRKGFHSLEEVQADKAIHFTKMQKAGFLYYDDISAAVCKAEADAIGQIVEETVRLIAPDAILTLTGGFRRGKECGHDVDFLITTPEMGKEQLLPKVINLWEKKGLLLYYDLVESTFDKTRLPCRKFEAMDHFQKCFAIIKLKKELAAGRVQKDWKAIRVDFVMPPVDNFAFALLGWTGSRQFERDLRRFARHERKMLLDRHALYDKTKKIFLPAKTEEDIFAHLGLDYIPPWQRNA

SEQ ID NO: 355 - protein, 362 aa, Artificial Sequence
  Modified TdT Sequence
MENLYFQGTVSQYACQRRTTMENHNQIFTDAFAILAENAEFNESEGPCLAFRRAASLLKSLPHAISSSKDLEGLPCLGDQTKAVIEDILEYGQCSKVQDVLCDDRYQTIKLFTSVFGVGLKTAEKWYRMGFHSLEEVQADKAIQFTKMQKAGFLYYDDISAAVCKAEADAIGQIVEETVRLIAPDAIVTLTGGFRRGKEIGHDVDFLITTPEMGKEQLLPRVINLLEKKGLLLYYDLVESTFDKTRLPCRKFEAMDHFQKCFAIIKLKKELAAGRVQKDWKAIRVDFVMPPVDCFAFALLGWTGSRQFERDLRRFARHERKMLLDRHALYDKTKKIFLPAKTEEDIFAHLGLDYIPPWQRNA

SEQ ID NO: 356 - protein, 362 aa, Artificial Sequence
  Modified TdT Sequence
MENLYFQGTVSQYACQRRTTMENHNQIFTDAFAILAENAEFNESEGPALAFRRAASLLKSLPHAISSSKDLEGLPCLGDQTKAVIEDILEYGQCSKVQDVLCDDRYQTIKLFTSVFGVGLKTAEKWYRKGFHSLEEVQADNAIQFTKMQKAGFLYYDDISAAVCKAEADAIGQIVEETVRLIAPDAIVTLTGGFRRGKECGHDVDFLITTPEMGKEQLLPKVINLWEKKGLLLYYDLVESTFDKTRLPCRKFEAMDHFQKCFAIIKLKKELAAGRVQKDWKAIRVDFVMPPVDNFAFALLGWTGSRQFERDLRRFARHERKMLLDRHALYDKTKKIFLPAKTEEDIFAHLGLDYIPPWQRNA

SEQ ID NO: 357 - protein, 362 aa, Artificial Sequence
  Modified TdT Sequence
MENLYFQGTVSQYACQRRTTMENHNQIFTDAFAILAENAEFNESEGPALAFRRAASLLKSLPHAISSSKDLEGLPCLGDQTKAVIEDILEYGQCSKVQDVLCDDRYQTIKLFTSVFGVGLKTAEKWYRKGFHSLEEVQADKAIQFTKMQRAGFLYYDDISAAVCKAEADAIGQIVEETVRLIAPDAIVTLTGGFRRGKEIGHDVDFLITTPEMGKEQLLPKVINLLEKKGLLLYYDLVESTFDKTRLPCRKFEAMDHFQKCFAIIKLKKELAAGRVQKDWKAIRVDFVMPPIDNFAFALLGWTGSRQFERDLRRFARHERKMLLDRHALYDKTKKIFLPAKTEEEIFAHLGLDYIPPWQRNA

SEQ ID NO: 358 - protein, 362 aa, Artificial Sequence
  Modified TdT Sequence
MENLYFQGTVSQYACQRRTTMENHNQIFTDAFAILAENAEFNESEGPCLAFRRAASLLKSLPHAISSSKDLEGLPCLGDQSKAVIEDILEYGQCSKVQDVLCDDRYQTIKLFTSVFGVGLKTAEKWYRKGFHSLEEVQADKAIHFTKMQRAGFLYYDDISAAVCKAEADAIGQIVEETVRLIAPDAIVTLTGGFRRGKECGHDVDFLITTPEMGKEQLLPKIINLWEKKGLLLYYDLVESTFDKTRLPCRKFEAMDHFQKCFAIIKLKKELAAGRVQKDWKAIRVDFVMPPVDNFAFALLGWTGSRQFERDLRRFARHERKMLLDRHALYDKTKKIFLPAKTEEDIFAHLGLDYIPPWQRNA

SEQ ID NO: 359 - protein, 362 aa, Artificial Sequence
  Modified TdT Sequence
MENLYFQGTVSQYACQRRTTMENHNQVFTDAFAILAENAEFNESEGPALAFRRAASLLKSLPHAISSSKDLEGLPCLGDQTKAVIEDILEYGQCSKVQDVLCDDRYQTIKLFTSVFGVGLKTAEKWYRKGFHSLEEVQADKAIQFTKMQKAGFLYYDDISAAVCKAEADAIGQIVEETVRKIAPDAIVTLTGGFRRGKEIGHDVDFLITTPEMGKEQLLPKVINLLEKKGLLLYYDLVESTFDKTRLPCRKFEAMDHFQKCFAIIKLKKELAAGRVQKDWKAIRVDFVMPPVDNFAFALLGWTGSRQFERDLRRFARHERKMLLDRHALYDRTKKIFLPAKTEEDIFAHLGLDYIPPWQRNA

SEQ ID NO: 360 - protein, 362 aa, Artificial Sequence
  Modified TdT Sequence
MENLYFQGTVSQYACQRRTTMENHNQIFTDAFAILAENAEFNESEGPALAFRRAASLLKSLPHAISSSKDLEGLPCLGEQTKAVIEDILEYGQCSKVQDVLCDDRYQTIKLFTSVFGVGLKTAEKWYRKGFHSLEEVQADKAIQFTKMQKAGFLYYDDISAAVCKAEADAIGQIVEETVHLIAPDAIVTLTGGFRRGKECGHDVDFLITTPEMGKEQLLPDVINLLEKKGLLLYYDLVESTFDKTRLPCRKFEAMDHFQKCFAIIKLEKELAAGRVQKDWKAIRVDFVMPPIDNFAFALLGWTGSRQFERDLRRFARHERKMLLDRHALYDKTKKIFLPAKTEEDIFAHLGLDYIPPWQRNA

SEQ ID NO: 361 - protein, 362 aa, Artificial Sequence
  Modified TdT Sequence
MENLYFQGTVSQYACQRRTTMENHNQIFTDAFAILAENAEFRESEGPALAFRRAASLLKSLPHAISSSKDLEGLPCLGDQTKAVIEDILEYGQCSKVQDVLCDDRYQTIKLFTSVFGVGLKTAEKWYRKGFHTLEEVQADKAIQFTKMQRAGFLYYDDISAAVCKAEADAIGQIVEETVRLIAPDAIVTLTGGFRRGKEIGHDVDFLITTPEMGKEQLLPKVINLLEKKGLLLYYDLVESTFDKTRLPCRKFEAMDHFQKCFAIIKLKKELADGRVQKDWKAIRVDFVMPPVDNFAFALLGWTGSRQFERDLRRFARHERKMLLDRHALYDKTKKIFLPAKTEEDIFAHLGLDYIPPWQRNA

SEQ ID NO: 362 - protein, 362 aa, Artificial Sequence
  Modified TdT Sequence
MENLYFQGTVSQYACQRRTTMENHNQIFTDAFAILAENAEFNESEGPALAFRRAASLLKSLPHAISSSKDLEGLPCLGDQTKAVIEDILEYGQCSKVQDVLCDDRYQTIKLFTSVFGVGLKTAEKWYRKGFHSLEEVQADKAIHFTKMQKAGFLYYDDISAAVCKAEADAIGQIVEETVRLIAPDAIVTLTGGFRRGKEIGHDVDFLITTPEMGREQLLPKVINLLEKKGLLLYYDLVESTFDKTRLPCRKFEAMDHFQKCFAIIKLKKELAAGRVQKDWKAIRVDFVMPPIDNFAFALLGWTGSRQFERDLRRFARHERKMLLDRHALYDKTKKIFLPAKTEEDIFAHLGLDYIPPWQRNA

SEQ ID NO: 363 - protein, 362 aa, Artificial Sequence
  Modified TdT Sequence
MENLYFQGTVSQYACQRRTTMENHNQIFTDAFAILAENAEFNESEGPCLAFRRAASLLKSLPHAISSSKDLEDLPCLGDQTKAVIEDILEYGQCSKVQDVLCDDRYQTIKLFTSVFGVGLKTAEKWYRKGFHSLEEVQADKAIHFTKMQKAGFLYYDDISAAVCKAEADAIGQIVEETVRLIAPDAIVTLTGGFRRGKEIGHDVDFLITTPEMGKEQLLPRVINLLEKKGLLLYYDLVESTFDKTRLPCRKFEAMDHFQKCFAIIKLKKELADGRVQKDWKAIRVDFVMPPVDNFAFALLGWTGSRQFERDLRRFARHERKMLLDRHALYDKTKRIFLPAKTEEDIFAHLGLDYIPPWQRNA

SEQ ID NO: 364 - protein, 362 aa, Artificial Sequence
  Modified TdT Sequence
MENLYFQGTVSQYACQRRTTMENHNQIFTDAFAILAENAEFNESEGPALAFRRAASLLKSLPHAISSSKDLEGLPCLGDQTKAVIEDILEYGQCSKVQDVLCDDRYQTIKLFTSVFGVGLKTAEKWYRKGFHTLEEVQADKAIQFTKMQKAGFLYYDDISAAVCKAEADAIGQIVEETVRLIAPDAIVTLTGGFRRGKEIGHDVDFLITTPEMGKEQLLPKVIDLLEKKGLLLYYDLVESTFDKTRLPCRKFEAMDHFQKCFAIIKLKKELAAGRVQKDWKAIRVDFVMPPIDNFAFALLGWTGSRQFERDLRRFARHERKMLLDRHALYDKTKKIFLPAKTEEDIFAHLGLDYIPPWQRNA

SEQ ID NO: 365 - protein, 362 aa, Artificial Sequence
  Modified TdT Sequence
MENLYFQGTVSQYACQRRTTMENHNQIFTDAFAILAENAEFNESEGPALAFRRAASLLKSLPHAISSSKDLEGLPCLGDQTKAVIEDILEYGQCSKVQDVLCDDRYQTIKLFTSVFGVGLKTAEKWYRKGFHSLEEVQADRAIQFTKMQKAGFLYYDDISAAVCKAEADAIGQIVEETVRLIAPDAIVTLTGGFRRGKEIGHDVDFLITTPEMGKEQLLPKVINLLEKKGLLLYYDLVESTFDKTRLPCRKFEAMDHFQKCFAIIKLKKELAAGRVQKDWKAIRVDFVMPPVDNFAFALLGWTGSRQFERDLRRFARHERKMLLDRHALYDKTKKIFLPAKTEEEIFAHLGLEYIPPWQRNA

SEQ ID NO: 366 - protein, 362 aa, Artificial Sequence
  Modified TdT Sequence
MENLYFQGTVSQYACQRRTTMENHNQIFTDAFAILAENAEFNESEGPALAFRRAASLLKSLPHAISSSKDLEGLPCLGDQTKAVIEDILEYGQCSKVQDVLCDDRYQTIKLFTSVFGVGLKTAEKWYRKGFHSLEEVQADKAIQFTKMQRAGFLYYDDISAAVCKAEADAIGQIVEETVRLIAPDAIVTLTGGFRRGKEIGHDVDFLITTPEMGREQLLPDVINLLEKKGLLLYYDLVESTFDKTRLPCRKFEAMDHFQKCFAIIKLKKELAAGRVQKDWKAIRVDFVMPPVDNFAFALLGWTGSRQFERDLRRFARHERKMLLDRHALYDKTKKIFLPAKTEEDIFAHLGLDYIPPWQRNA

SEQ ID NO: 367 - protein, 362 aa, Artificial Sequence
  Modified TdT Sequence
MENLYFQGTVSQYACQRRTTMENHNQIFTDAFAILAENAEFNESEGPALAFRRAASLLKSLPHAISSSKDLEGLPCLGDQTKGVIEDILEYGQCSKVQDVLCDDRYQTIKLFTSVFGVGLKTAEKWYRKGFHSLEEVQADKAIQFTKMQKAGFLYYDDISAAVCKAEADAIGQIVEETVRLIAPDAIVTLTGGFRRGKEIGHDVDFLITTPEQGKEQLLPKVINLLEKKGLLLYYDLVESTFDKTRLPCRKFEAMDHFQKCFAIIKLKKELAAGRVQKDWKAIRVDFVMPPVDNFAFALLGWTGSRQFERDLRRFARHERKMLLDRHALYDKTKKIFLPAKSEEDIFAHLGLDYIPPWQRNA

SEQ ID NO: 368 - protein, 362 aa, Artificial Sequence
  Modified TdT Sequence
MENLYFQGTVSQYACQRRTTMENHNQVFTDAFAILAENAEFNESEGPALAFRRAASLLKSLPHAISSSKDLEGLPCLGDQTKAVIEDILEYGQCSKVQDVLCDDRYQTIKLFTSVFGVGLKTAEKWYRKGFHSLEEVQADKAIQFTKMQKAGFLYYDDISAAVCKAEADAIGQIVEETVRLIAPDALVTLTGGFRRGKEIGHDVDFLITTPEMGKEQLLPKLIDLLEKKGLLLYYDLVESTFDKTRLPCRKFEAMDHFQKCFAIIKLKKELAAGRVQKDWKAIRVDFVMPPVDNFAFALLGWTGSRQFERDLRRFARHERKMLLDRHALYDKTKKIFLPAKTEEDIFAHLGLDYIPPWQRNA

SEQ ID NO: 369 - protein, 362 aa, Artificial Sequence
  Modified TdT Sequence
MENLYFQGTVSQYACQRRTTMENHNQIFTDAFAILAENAEFNENEGPCLAFRRAASLLKSLPHAISSSKDLEGLPCLGDQTKAVIEDILEYGQCSKVQDVLCDDRYQTIKLFTSVFGVGLKTAEKWYRKGFHSLEEVQADKAIHFTKMQRAGFLYYDDISAAVCKAEADAIGQIVEETVRLIAPDAIVTLTGGFRRGKEIGHDVDFLITTPEMGKEQLLPRVINLWEKKGLLLYYDLVESTFDKTRLPCRKFEAMDHFQKCFAIIKLKKELAAGRVQKDWKAIRVDFVMPPVDNFAFALLGWTGSRQFERDLRRFARHERKMLLDRHALYDKTKKIFLPAKTEEDIFAHLGLDYIPPWQRNA

SEQ ID NO: 370 - protein, 362 aa, Artificial Sequence
  Modified TdT Sequence
MENLYFQGTVSQYACQRRTTMENHNQIFTDAFAILAENAEFNESEGPALAFRRAASLLKSLPHAISSSKDLEGLPCLGDQTKAVIEDILEYGQCSKVQDVLCDDRYQTIKLFTSVFGVGLKTAEKWYRKGFHSLEEVQADKAIQFTKMQRAGFLYYDDISAAVCKAEADAIGQIVEETVRLIAPDAIVTLTGGFRRGKEIGHDVDFLITTPEMGKEQLLPKVIDLLEQKGLLLYYDLVESTFDKTRLPCRKFEAMDHFQKCFAIIKLKKELADGRVQKDWKAIRVDFVMPPVDNFAFALLGWTGSRQFERDLRRFARHERKMLLDRHALYDKTKKIFLPAKTEEDIFAHLGLDYIPPWQRNA

SEQ ID NO: 371 - protein, 362 aa, Artificial Sequence
  Modified TdT Sequence
MENLYFQGTVSQYACQRRTTMENHNQIFTDAFAILAENAEFNESEGPALAFRRAASLLKSLPHAISSSKDLEGLPCLGDQTKAVIEDILEYGQCSKVQDVLCDDRYQTIKLFTSVFGVGLKTAEKWYRKGFHSLEEVQADKSIQFTKMQKAGFLYYDDISAAVCKAEADAIGHIVEETVRLIAPDAIVTLTGGFRRGKECGHDVDFLITTPEMGKEQLLPDVINLLEKKGLLLYYDLVESTFDKTRLPCRKFEAMDHFQKCFAIIKLKKERAAGRVQKDWKAIRVDFVMPPIDNFAFALLGWTGSRQFERDLRRFARHERKMLLDRHALYDKTKKIFLPAKTEEDIFAHLGLDYIPPWQRNA

SEQ ID NO: 372 - protein, 362 aa, Artificial Sequence
  Modified TdT Sequence
MENLYFQGTVSQYACQRRTTMENHNQIFTDAFAILAENAEFNESEGPALAFRRAASLLKSLPHAISSLKDLEGLPCLGDQTKAVIEDILEYGQCSKVQDVLCDDRYQTIKLFTSVFGVGLKTAEKWYRKGFHSLEEVQADKAIQFTKMQKAGFLYYDDISAAVCKAEADAIGQIVEETVRLIAPDAIVTLTGGFRRGKEIGHDVDFIITTPEMGKEQLLPKVINLLEKKGLLLYYDLVESTFDKTRLPCRKFEAMDHFQKCFAIIKLKKELAAGRVQKDWKAIRVDFVMPPADNFAFALLGWTGSRQFERDLRRFARHERKMLLDRHALYDKTKKIFLPAKTEEDIFAHLGLDYIPPWQRNA

SEQ ID NO: 373 - protein, 362 aa, Artificial Sequence
  Modified TdT Sequence
MENLYFQGTVSQYACQRRTTMENHNQIFTDAFAILAERAEFNESESPCLAFRRAASLLKSLPHAISSSKDLEGLPCLGDQTKAVIEDILEYGQCSKVQDVLCDDRYQTIKLFTSVFGVGLKTAEKWYRKGFHTLEEVQADKAIHFTKMQKAGFLYYDDISAAVCKAEADAIGQIVEETVRLIAPDAIVTLTGGFRRGKEIGHDVDFLITTPEMGKEQLLPRVINLLEKKGLLLYYDLVESTFDKTRLPCRKFEAMDHFQKCFAIIKLKKELAAGRVQKDWKAIRVDFVMPPVDNFAFALLGWTGSRQFERDLRRFARHERKMLLDRHALYDKTKKIFLPAKTEEDIFAHLGLDYIPPWQRNA

SEQ ID NO: 374 - protein, 362 aa, Artificial Sequence
  Modified TdT Sequence
MENLYFQGTVSQYACQRRTTMENHNQIFTDAFAILAENAEFNESEGPCLAFRRAASLLKSLPHAISSSKDLEGLPCLGDQTKAVIEDILEYGQCSKVQDVLCDDRYQTIKLFTSVFGVGLKTAEKWYRKGFHSLEEVQANKAIHFTKMQKAGFLYYDDISAAVCKAEADAIGQIVEETVRLIAPDAIVTLTGGFRRGKECGHDVDFLITTPEAGKEQLLPKVINLWEKKGLLLYYDLVESTFDKTRLPCRKFEAMDHFQKCFAIIKLKKELAAGRVQKDWKAIRVDFVMPPIDNFAFALLGWTGSRQFERDLRRFARHERKMLLDRHALYDKTKKIFLPAKTEEDIFAHLGLDYIPPWQRNA

SEQ ID NO: 375 - protein, 362 aa, Artificial Sequence
  Modified TdT Sequence
MENLYFQGTVSQYACQRRTTMENHNQIFTDAFAILAENAEFNESEGPALAFLRAASLLKSLPHAISSSKDLEGLPCLGDQTKAVIEDILEYGQCSKVQDVLCDDRYQTIKLFTSVFGVGLKTAEKWYRKGFHSLEEVQADKAIQFTKMQKAGFLYYDDISAAVCKAEADAIGQIVEETVRLIAPDAIVTLTGGFRRGKEIGHDVDFLITTPEMGKEQLLPKVINLLEQKGLLLYYDLVESTFDITRLPCRKFEAMDHFQKCFAIIKLKKELAAGRVQKDWKAIRVDFVMPPVDNFAFALLGWTGSRQFERDLRRFARHERKMLLDRHALYDKTKKIFLPAKTEEDIFAHLGLDYIPPWQRNA

SEQ ID NO: 376 - protein, 362 aa, Artificial Sequence
  Modified TdT Sequence
MENLYFQGTVSQYACQRRTTMENHNQIFTDAFAILAENAEFNESEGPALAFRRAASLLKSLPHAISSSKDLEGLPCLGDQTKAVIEDILEYGQCSKVQDVLCDDRYQTIKLFTSVFGVGLKTAEKWYRKGFHSLEEVQADKAIQFTKMQRAGFLYYDDISAAVCKAEADAIGQIVEETVRLIAPDAIVTLTGGFRRGKEIGHDVDFLITTPEMGKEQLLPKVINLLEKKGLLLYYHLVESTFDKTRLPCRKFEAMDHFQKCWAIIKLKKELAAGRVQKDWKAIRVDFVMPPVDNFAFALLGWTGSRQFERDLRRFARHERKMLLDRHALYDRTKKIFLPAKTEEDIFAHLGLDYIPPWQRNA

SEQ ID NO: 377 - protein, 362 aa, Artificial Sequence
  Modified TdT Sequence
MENLYFQGTVSQYACQRRTTMENHNQIFTDAFAILAENAEFRESEGPALAFRRAASLLKSLPHAISSSKDLEGLPCLGDQTKAVIEDILEYGQCSKVQDVLCDDRYQTIKLFTSVFGVGLKTAEKWYRKGFHSLEEVQADKAIQFTKMQKAGFLYYDDISAAVCKAEADAIGQIVEETVRLIAPDAIVTLTGGFRRGKEIGHDVDFLITTPEMGKEQLLPKVIDLLEKKGLLLYYDLVESTFDKTRLPCRKFEAMDHFQKCFAILKLKKELAAGRVQKDWKAIRVDFVMPPVDNFAFALLGWTGSRQFERDLRRFARHERKMLLDRHALYDKTKKIFLPAKTEEDIFAHLGLDYIPPWQRNA

SEQ ID NO: 378 - protein, 362 aa, Artificial Sequence
  Modified TdT Sequence
MENLYFQGTVSQYACQRRTTMENHNQIFTDAFAILAENAEFNENEGPALAFRRAASLLKSLPHAISSSKDLEGLPCLGDQTKAVIEDILEYGQCSKVQDVLCDDRYQTIKLFTSVFGVGLKTAEKWYRKGFHSLEEVQADKAIQFTKMQKAGFLYYDDISAAVCKAEADAIGQIVEETVRKIAPDAIVTLTGGFRRGKECGHDVDFLITTPEMGKEQLLPKVMNLLEKKGLLLYYDLVESTFDKTRLPCRKFEAMDHFQKCFAIIKLKKELAAGRVQKDWKAIRVDFVMPPIDNFAFALLGWTGSRQFERDLRRFARHERKMLLDRHALYDKTKKIFLPAKTEEDIFAHLGLDYIPPWQRNA

SEQ ID NO: 379 - protein, 362 aa, Artificial Sequence
  Modified TdT Sequence
MENLYFQGTVSQYACQRRTTMENHNQIFTDAFAILAENAEFNESEGPCLAFRRAASLLKSLPHAISSSKDLEGLPCLGDQTKAVIEDILEYGQCSKVQDVLCDDRYQTIKLFTSVFGVGLKTAEKWYRKGFHSLEEVQADKAIHFTKMQRAGFLYYDDISAAVCKAEADAIGQIVEETVRLIAPDAIVALTGGFRRGKEIGHDVDFLITTPEMGKEQLLPRLINLLEKKGLLLYYDLVESTFDKTRLPCRKFEAMDHFQKCFAIIKLKKELAAGRVQKDWKAIRVDFVMPPVDNFAFALLGWTGSRQFERDLRRFARHERKMLLDRHALYDKTKKIFLPAKTEEDIFAHLGLDYIPPWQRNA

SEQ ID NO: 380 - protein, 362 aa, Artificial Sequence
  Modified TdT Sequence
MENLYFQGTVSQYACQRRTTMENHNQLFTDAFAILAENAEFNESEGPALAFRRAASLLKSLPHAISSSKDLEGLPCLGDQTKAVIEEILEYGQCSKVQDVLCDDRYQTIKLFTSVFGVGLKTAEKWYRKGFHSLEEVQADKAIQFTKMQKAGFLYYDDISAAVCKAEADAIGQIVEETVRLIAPDAIVTLTGGFRRGKECGHDVDFLITTPEMGKEQLLPDVINLLEKKGLLLYYDLVESTFDKTRLPCRRFEAMDHFQKCFAIIKLKKELAAGRVQKDWKAIRVDFVMPPIDNFAFALLGWTGSRQFERDLRRFARHERKMLLDRHALYDKTKKIFLPAKTEEDIFAHLGLDYIPPWQRNA

SEQ ID NO: 381 - protein, 362 aa, Artificial Sequence
  Modified TdT Sequence
MENLYFQGTVSQYACQRRTTMENHNQIFTDAFAILAENAEFNESEGPCLAFRRAASLLKSLPHAISRSKDLEGLPCLGDQTKAVIEDILEYGQCSKVQDVLCDDRYQTIKQFTSVFGVGLKTAEKWYRKGFHSLEEVQADKAIHFSKMQKAGFLYYDDISAAVCKAEADAIGQIVEETVRLIAPDAIVTLTGGFRRGKECGHDVDFLITTPEMGKEQLLPKVINLWEKKGLLLYYDLVESTFDKTRLPCRKFEAMDHFQKCFAIIKLKKELAAGRVQKDWKAIRVDFVMPPVDNFAFALLGWTGSRQFERDLRRFARHERKMLLDRHALYDKTKKIFLPAKTEEDIFAHLGLDYIPPWQRNA

SEQ ID NO: 382 - protein, 362 aa, Artificial Sequence
  Modified TdT Sequence
MENLYFQGTVSQYACQRRTTMENHNQIFTDAFAILAENAEFNESEGPALAFLRAASLLKSLPHAISSLKDLEGLPCLGDQTKAVIEDILEYGQCSKVQDVLCDDRYQTIKLFTSVFGVGLKTAEKWYRKGFHSLEEVQADKAIQFTKMQKAGFLYYDDISAAVCKAEADAIGQIVEETVRLIAPDAIVTLTGGFRRGKEIGHDVDFLITTPEMGKEQLLPKVINLLEKKGLLLYYDLVESTFDKTRLPCRKFEAMDHFQKCFAIIKLKKELAAGRVQKDWKAIRVDFVMPPVDNFAFALLGWTGSRQFERDLRRFARHERKMLLDRHALYDKTKKIFLPAKSEEDIFAHLGLDYIPPWQRNA

SEQ ID NO: 383 - protein, 362 aa, Artificial Sequence
  Modified TdT Sequence
MENLYFQGTVSQYACQRRTTMENHNQIFTDAFAILAENAEFNESEGPALAFRRAASLLKSLPHAISSLKDLEGLPCLGDQTKAVIEDILEYGQCSKVQDVLCDDRYQTIKLFTSVFGVGLKTAEKWYRKGFHSLEEVQADKAIQFTKMQKAGFLYYDDISAAVCKAEADAIGQIVEETVRKIAPDAIVTLTGGFRRGKECGHDVDFIITTPEMGKEQLLPDVINLLEKKGLLLYYDLVESTFDKTRLPCRKFEAMDHFQKCFAIIKLKKELAAGRVQKDWKAIRVDFVMPPIDNFAFALLGWTGSRQFERDLRRFARHERKMLLDRHALYDKTKKIFLPAKTEEDIFAHLGLEYIPPWQRNA

SEQ ID NO: 384 - protein, 362 aa, Artificial Sequence
  Modified TdT Sequence
MENLYFQGTVSQYACQRRTTMENHNQIFTDAFAILAENAEFNENEGPALAFRRAASLLKSLPHAISSSKDLEGLPCLGDQTKAVIEDILEYGQCSKVQDVLCDDRYQTIKLFTSVFGVGLKTAEKWYRKGFHSLEEVQADKAIQFTKMQKAGFLYYDDISAAVCKAEADAIGCIVEETVHLIAPDAIVTLTGGFRRGKEIGHDVDFLITTPEMGKEQLLPKVINLLEKKGLLLYYDLVESTFDKTRLPCRKFEAMDHFQKCFAIIKLKKELAAGRVQKDWKAIRVDFVMPPVDNFAFALLGWTGSRQFERDLRRFARHERKMLLDRHALYDKTKKIFLPAKTEEEIFAHLGLDYIPPWQRNA

SEQ ID NO: 385 - protein, 362 aa, Artificial Sequence
  Modified TdT Sequence
MENLYFQGTVSQYACQRRTTMENHNQIFTDAFAILAENAEFNESEGPALAFRRAASLLKSLPHAISSSKDLEGLPCLGDQTKAVIEDILEYGQCSKVQDVLCDDRYQTIKLFTSVFGVGLKTAEKWYRKGFHSLEEVQADKAIQFTKMQKAGFLYYDDISAAVCKAEADAIGQIVEETVRLIAPDAIVTLTGGFRRGKEIGHDVDFLITTPEMGKEQLLPKLINLLEQKGLLLYYDLVESTFDKTRLPCRKFEAMDHFQKCFAIIKLKKELAAGRVQKDWKAIRVDFVMPPIDNFAFALLGWTGSRQFERDLRRFARHERKMLLDRHALYDKTKKIFLPAKTEEDIFAHLGLDYIPPWQRNA

SEQ ID NO: 386 - protein, 362 aa, Artificial Sequence
  Modified TdT Sequence
MENLYFQGTVSQYACQRRTTMENHNQIFTDAFAILAENAEFNESEGPCLAFRRAASLLKSLPHAIISSKDLEGLPCLGDQTKAVIEDILEYGQCSKVQDVLCDDRYQTIKLFTSVFGVGLKTAEKWYRKGFHSLEEVQADKAIHFTKMQKAGFLYYDDISAAVCKAEADAIGQIVEETVRLIAPDAIVTLTGGFRRGKECGHDVDFLITTPEMGKEQLLPKVINLWEKKGLLLYYDLVESTFDKTRLPCRKFEAMDNFQKCFAIIKLKKELAAGRVQKDWKAIRVDFVMPPVDNYAFALLGWTGSRQFERDLRRFARHERKMLLDRHALYDKTKKIFLPAKTEEDIFAHLGLDYIPPWQRNA

SEQ ID NO: 387 - protein, 362 aa, Artificial Sequence
  Modified TdT Sequence
MENLYFQGTVSQYACQRRTTMENHNQIFTDAFAILAENAEFNESEGPALAFRRAASLLKSLPHAISSSKDLEGLPCLGDQTKGVIEDILEYGQCSKVQDVLCDDRYQTIKLFTSVFGVGLKTAEKWYRKGFHSLEEVQADKAIQFTKMQKAGFLYYDDISAAVCKAEADAIGQIVEETVRLIAPDAIVTLTGGFRRGKECGHDVDFLITTPEQGKEQLLPDVINLLEKKELLLYYDLVESTFDKTRLPCRKFEAMDHFQKCFAIIKLKKELAAGRVQKDWKAIRVDFVMPPIDNFAFTLLGWTGSRQFERDLRRFARHERKMLLDRHALYDKTKKIFLPAKTEEDIFAHLGLDYIPPWQRNA

SEQ ID NO: 388 - protein, 362 aa, Artificial Sequence
  Modified TdT Sequence
MENLYFQGTVSQYACQRRTTMENRNQIFTDAFAILAENAEFNENEGPALAFRRAASLLKSLPHAISSSKDLEGLPCLGDQTKAVIEDILEYGQCSKVQEVLCDDRYQTIKLFTSVFGVGLKTAEKWYRKGFHSLEEVQADKAIQFTKMQKAGFLYYDDISAAVCKAEADAIGQIVEETVRLIAPDAIVTLTGGFRRGKECGHDVDFLITTPEMGKEQLLPDVINLLEKKGLLLYYDLVESTFDKTRLPCRKFEAMDHFQKCFAIIKLKKELAAGRVQKDWKAIRVDFVMPPIDNFAFALLGWTGSRQFERDLRRFARHERKMLLDRHALYDKTKKIFLPAKTEEDIFAHLGLDYIPPWQRNA

SEQ ID NO: 389 - protein, 362 aa, Artificial Sequence
  Modified TdT Sequence
MENLYFQGTVSQYACQRRTTMENHNQIFTDAFAILAENAEFNESEGPCLAFRRAASLLKSLPHAISRSKDLEGLPCLGDQTKCVIEDILEYGQCSKVQDVLCDDRYQTIKLFTSVFGVGLKTAEKWYRKGFHSLEEVQADKAIHFTKMQKAGFLYYDDISAAVCKAEADAIGQIVEETVRLIAPDAIVTLTGGFRRGKNCGHDVDFLITTPEMGKEQLLPKVINLWEKKGLLLYYDLVESTFDKTRLPCRKFEAMDHFQKCFAIIKLKKELAAGRVQKDWKAIRVDFVMPPVDNFAFALLGWTGSRQFERDLRRFARHERKMLLDRHALYDKTKKIFLPAKTEEDIFAHLGLDYIPPWQRNA

SEQ ID NO: 390 - protein, 362 aa, Artificial Sequence
  Modified TdT Sequence
MENLYFQGTVSQYACQRRTTMENHNQIFTDAFAILAENAEFNESEGPCLAFRRAASLLKSLPHAISSSKDLEGLPCLGDQTKAVIEDILEYGQCSKVQDVLCDDRYQTIKQFTSVFGVGLKTAEKWYRKGFHSLEEVQADKAIHFTKMQKAGFLYYDDISAAVCKAEADAIGQIVEETVRLITPDAIVTLTGGFRRGKECGHDVDFLITTPEMGKEQLLPKVINLWEKKGLLLYYDLVESTFDKTRLPCRKFEAMDHFQKCFAIIKLKKELAAGRVQKDWKAIRVDFVMPPVDNYAFALLGWTGSRQFERDLRRFARHERKMLLDRHALYDKTKKIFLPAKTEEDIFAHLGLDYIPPWQRNA

SEQ ID NO: 391 - protein, 362 aa, Artificial Sequence
  Modified TdT Sequence
MENLYFQGTVSQYACQRRTTMENHNQIFTDAFAILAENAEFNESEGPALAFRRAASLLKSLPHAISSSKDLEGLPCLGDQTKAVIEDILEYGQCSKVQDVLCDDRYQTIKLFTSVFGVGLKTAEKWYRKGFHSLEEVQADKAIQFTKMQKAGFLYYDDISAAVCKAEADAIGQIVEETVRLIAPDAIVTLTGGFRRGKEIGHDVDFLITTPEMGKEQLLPKVINLLEKKGLLLYYDLVESTFDKTRLPCRKFEAMDHFQKCFAIIKLKKELAAGRVQKDWKAIRVDFVMPPVDNFAFALLGWTGSRQFERDLRRFARHERKMLLDRHALYDKTKKIFLPAKTEEDIFAHLGLDYIPPWQRNA

SEQ ID NO: 392 - protein, 362 aa, Artificial Sequence
  Modified TdT Sequence
MENLYFQGTVSQYACQRRTTMENHNQIFTDAFAILAENAEFNESEGPALAFRRAASLLKSLPHAISSSKDLEGLPCLGDQTKAVIEDILEYGQCSKVQDVLCDDRYQTIKLFTSVFGVGLKTAEKWYRKGFHSLEEVQADKAIHFTKMQKAGFLYYDDISAAVCKAEADAIGQIVEETVRLIAPDAIVTLTGGFRRGKECGHDVDFLITTPEMGKEQLLPKVINLLEKKGLLLYYDLVESTFDKTRLPCRKFEAMDHFQKCFAIIKLKKELAAGRVQKDWKAIRVDFVMPPVDNFAFALLGWTGSRQFERDLRRFARHERKMLLDRHALYDKTKKIFLPAKSEEDIFAHLGLDYIPPWQRNA

SEQ ID NO: 393 - protein, 362 aa, Artificial Sequence
  Modified TdT Sequence
MENLYFQGTVSQYACQRRTTMENHNQIFTDAFAILAENAEFNESEGPALAFRRAASLLKSLPHAISSSKDLEGLPCLGDQTKAVIEDIYEYGQCSKVQDVLCDDRYQTIKLFTSVFGVGLKTAEKWYRKGFHSLEEVQADKAIQFTKMQKAGFLYYDDISAAVCKAEADAIGQIVEETVRLIAPDAIVTLTGGFRRGKECGHDVDFLITTPEMGKEQLLPDVMNLLEKKGLLLYYDLVESTFDKTRLPCRKFEAMDHFQKCFAIIRLKKELAAGRVQKDWKAIRVDFVMPPIDNFAFALLGWTGSRQFERDLRRFARHERKMLLDRHALYDKTKKIFLPAKTEEDIFAHLGLDYIPPWQRNA

SEQ ID NO: 394 - protein, 362 aa, Artificial Sequence
  Modified TdT Sequence
MENLYFQGTVSQYACQRRTTMENHNQIFTDAFAILAENAEFNESEGPALAFRRAASLLKSLPHAISSSKDLEGLPCLGDQTKAVIEDILEYGQCSKVQDVLCDDRYQTIKLFTSVFGVGLKTAEKWYRMGFHTLEEVQADKAIQFTKMQKAGFLYYDDISAAVCKAEADAIGQIVEETVRLIAPDAIVTLTGGFRRGKEIGHDVDFLITTPEMGKEQLLPKVINLLEQKGLLLYYDLVESTFDKTRLPCRKFEAMDHFQKCFAIIKLKKELAAGRVQKDWKAIRVDFVMPPVDNFAFALLGWTGSRQFERDLRRFARHERKMLLDRHALYDRTKKIFLPAKTEEDIFAHLGLDYIPPWQRNA

SEQ ID NO: 395 - protein, 362 aa, Artificial Sequence
  Modified TdT Sequence
MENLYFQGTVSQYACQRRTTMENHNQIFTDAFAILAENAEFNENEGPALAFRRAASLLKSLPHAISSSKDLEGLPCLGDQTKAVIEDILEYGQCSKVQDVLCDDRYQTIKLFTSVFGVGLKTAEKWYRKGFHSLEEVQADKAIQFTKMQKAGFLYYDDISAAVCKAEADAIGQIVEETVRKIAPDAIVTLTGGFRRGKEIGHDVDFLITTPEAGKEQLLPKVINLLEKKGLLLYYDLVESTFDKTRLPCRKFEAMDHFQKCFAIIKLKKELAAGRVQKDWKAIRVDFVMPPVDNFAFALLGWTGSRQFERDLRRFARHERKMLLDRHALYDKTKKIFLPAKTEEDIFAHLGLDYIPPWQRNA

SEQ ID NO: 396 - protein, 362 aa, Artificial Sequence
  Modified TdT Sequence
MENLYFQGTVSQYACQRRTTMENHNQIFTDAFAILAERAEFNESEGPCLAFRRAASLLKSLPHAISSSKDLEGLPCLGDQTKAVIEDILEYGQCSKVQDVLCDDRYKTIKLFTSVFGVGLKTAEKWYRKGFHSLEEVQADKAIHFTKMQKAGFLYYDDISAAVCKAEADAIGQVVEETVRLIAPDAIVTLTGGFRRGKEIGHDVDFLITTPEMGKEQLLPRVINLLEKKGLLLYYDLVESTFDKTRLPCRKFEAMDHFQKCFAIIKLKKELAAGRVQKDWKAIRVDFVMPPVDNFAFALLGWTGSRQFERDLRRFARHERKMLLDRHALYDKTKKIFLPAKTEEDIFAHLGLDYIPPWQRNA

SEQ ID NO: 397 - protein, 362 aa, Artificial Sequence
  Modified TdT Sequence
MENLYFQGTVSQYACQRRTTMENHNQIFTDAFAILAENAEFNESEGPALAFRRAASLLKSLPHAISSSKDLEGLPCLGDQTKAVIEDILEYGQCSKVQDVLCDDRYQTIKLFTSVFGVGLKTAEKWYRKGFHSLEEVQADRAIHFTKMQKAGFLYYDDISAAVCKAEADAIGQIVEETVRLIAPDAIVTLTGGFRRGKEIGHDVDFLITTPEMGKEQLLPKLINLLEKKGLLLYYDLVESTFDKTRLPCRKFEAMDHFQKCFAIIKLKKELAAGRVQKDWKAIRVDFVMPPVDNFAFALLGWTGSRQFERDLRRFARHERKMLLDRHALYDKTKKIFLPAKTEEDIFAHLGLDYIPPWQRNA

SEQ ID NO: 398 - protein, 362 aa, Artificial Sequence
  Modified TdT Sequence
MENLYFQGTVSQYACQRRTTMENHNQIFTDAFAILAENAEFNESEGPALAFRRAASLLKSLPHAISSSKDLEGLPCLGDQTKAVIEDILEYGQCSKVQDVLCDDRYQTIKLFTSVFGVGLKTAEKWYRKGFHTLEEVQADKAIQFTKMQKAGFLYYDDISAAVCKAEADAIGQIVEETVRLIAPDAIVTLTGGFRRGKEIGHDVDFLITTPEMGKEQLLPDVINLLEKKGLLLYYDLVESTFDKTRLPCRKFEAMDHFQKCFAIIKLKKELAAGRVQKDWKAIRVDFVMPPVDNFAFALLGWTGSRQFERDLRRFARHERKMLLDRHALYDKTKKIFLPAKTEEEIFAHLGLDYIPPWQRNA

SEQ ID NO: 399 - protein, 362 aa, Artificial Sequence
  Modified TdT Sequence
MENLYFQGTVSQYACQRRTTMENHNQIFTDAFAILAENAEFNENEGPALAFRRAASLLKSLPHAISSSKDLEGLPCLGDQTKAVIEDILEYGQCSKVQDVLCDDRYQTIKLFTSVFGVGLKTAEKWYRKGFHSLEEVQADKAIQFTKMQKAGFLYYDDISAAVCKAEADAIGQIVEETVRLIAPDAIVTLTGGFRRGKEIGHDVDFLITTPEMGKEQLLPKVIDLLEQKGLLLYYDLVESTFDKTRLPCRKFEAMDHFQKCFAIIKLKKEQAAGRVQKDWKAIRVDFVMPPVDNFAFALLGWTGSRQFERDLRRFARHERKMLLDRHALYDKTKKIFLPAKTEEDIFAHLGLDYIPPWQRNA

SEQ ID NO: 400 - protein, 362 aa, Artificial Sequence
  Modified TdT Sequence
MENLYFQGTVSQYACQRRTTMENHNQIFTDAFAILAENAEFNESEGPCLAFLRAASLLKSLPHAISSSKDLEGLPCLGDQTKAVIEDILEYGQCSKVQDVLCDDRYQTIKLFTSVFGVGLKTAEKWYRKGFHSLEEVQADKAIHFTKMQKAGFLYYDDISAAVCKAEADAIGQIVEETVRLIAPDAIVTLTGGFRRGKEIGHDVDFLITTPEMGKEQLLPRVINLLEKKGLLLYYDLVESTFDKTRLPCRKFEAMDHFQKCFAIIKLKKELAAGRVQKDWKAIRVDFVLPPIDNFAFALLGWTGSRQFERDLRRFARHERKMLLDRHALYDKTKKIFLPAKTEEDIFAHLGLDYIPPWQRNA

SEQ ID NO: 401 - protein, 362 aa, Artificial Sequence
  Modified TdT Sequence
MENLYFQGTVSQYACQRRTTMENHNQIFTDAFAILAENAEFNESEGPALAFRRAASLLKSLPHAISSSKDLEGLPCLGDQTKAVIEDIYEYGQCSKVQDVLCDDRYQTIKLFTSVFGVGLKTAEKWYRKGFHSLEEVQADRAIQFTKMQKAGFLYYDDISAAVCKAEADAIGQIVEETVRLIAPDAIVTLTGGFRRGKECGHDVDFLITTAEMGKEQLLPDVINLLEKKGLLLYYDLVESTFDKTRLPCRKFEAMDHFQKCFAIIKLKKELAAGRVQKDWKAIRVDFVMPPIDNFAFALLGWTGSRQFERDLRRFARHERKMLLDRHALYDKTKKIFLPAKTEEDIFAHLGLEYIPPWQRNA

SEQ ID NO: 402 - protein, 362 aa, Artificial Sequence
  Modified TdT Sequence
MENLYFQGTVSQYACQRRTTMENHNQIFTDAFAILAENAEFNESEGPCLAFLRAASLLKSLPHAISSSKDLEGLPCLGDQTKAVIEDILEYGQCSKVQDVLCDDRYQTIKLFTSVFGVGLKTAEKWYRKGFHSLEEVQADKAIHFTKMQRAGFLYYDDISAAVCKAEADAIGQIVEETVRLIAPDAIVTLTGGFRRGKEIGHDVDFLITTPEMGKEQLLPKVINLLEKKGLLLYYDLVESTFDKTRLPCRKFEAMDHFQKCFAIIKLKKELAAGRVQKDWKAIRVDFVMPPVDNFAFALLGWTGSRQFERDLRRFARHERKMLLDRHALYDKTKKIFLPAKTEEDIFAHLGLDYIPPWQRNA

SEQ ID NO: 403 - protein, 362 aa, Artificial Sequence
  Modified TdT Sequence
MENLYFQGTVSQYACQRRTTMENHNQIFTDAFAILAENAEFNESEGPCLAFRRAASLLKSLPHAISCSKDLEGLPCLGDQTKAVIEDILEYGQCSKVQDVLCDDRYQTIKLFTSVFGVGLKTAEKWYRKGFHSLEEVQADKAIHFTKMQKAGFLYYDDISAAVCKAEADAIGQIVEETVRLIAPDAIVTLTGGFRRGKECGHDVDFLITTPEMGKEQLLPKVIRLLEKKGLLLYYDLVESTFDKTRLPCRKFEAMDHFQKCFAIIKLKKELAAGRVQKDWKAIRVDFVMPPVDNFAFALLGWTGSRQFERDLRRFARHERKMLLDRHALYDKTKKIFLPAKTEEDIFAHLGLDYIPPWQRNA

SEQ ID NO: 404 - protein, 362 aa, Artificial Sequence
  Modified TdT Sequence
MENLYFQGTVSQYACQRRTTMENHNQIFTDAFAILAENAEFNESEGPCLAFLRAASLLKSLPHAISSSKDLEGLPCLGDQTKAVIEDILEYGQCSKAQDVLCDDRYQTIKLFTSVFGVGLKTAEKWYRKGFHSLEEVQADKAIHFTKMQKAGFLYYDDISAAVCKAEADAIGQIVEETVRLIAPDAIVTLTGGFRRGKECGHDVDFLITTPEMGKEQLLPKVINLWEQKGLLLYYDLVESTFDKTRLPCRKFEAMDHFQKCFAIIKLKKELAAGRVQKDWKAIRVDFVMPPVDNFAFALLGWTGSRQFERDLRRFARHERKMLLDRHALYDKTKKIFLPAKTEEDIFAHLGLDYIPPWQRNA

SEQ ID NO: 405 - protein, 362 aa, Artificial Sequence
  Modified TdT Sequence
MENLYFQGTVSQYACQRRTTMENHNQIFTDAFAILAENAEFNESEGPALAFRRAASLLKSLPHAILSSKDLEGLPCLGDQTKGVIEDILEYGQCSKVQDVLCDDRYQTIKLFTSVFGVGLKTAEKWYRKGFHSLEEVQADKAIQFTKMQKAGFLYYDDISAAVCKAEADAIGQIVEETVRLIAPDALVTLTGGFRRGKECGHDVDFLITTPEMGKEQLLPDVINLLEKKGLLLYYDLVESTFDKTRLPCRKFEAMDHFQKCFAIIKLKKERAAGRVQKDWKAIRVDFVMPPIDNFAFALLGWTGSRQFERDLRRFARHERKMLLDRHALYDKTKKIFLPAKTEEDIFAHLGLDYIPPWQRNA

SEQ ID NO: 406 - protein, 362 aa, Artificial Sequence
  Modified TdT Sequence
MENLYFQGTVSQYACQRRTTMENHNQIFTDAFAILAENAEFNESEGPCLAFRRAASLLKSLPHAISSSKDLEGLPCLGEQTKAVIEDILEYGQCSKVQDVLCDDRYQTIKLFTSVFGVGLKTAEKWYRKGFHSLEEVQADKSIQFTKMQKAGFLYYDDISAAVCKAEADAIGQIVEETVRLIAPDAIVTLTGGFRRGKECGHDVDFLITTPEMGKEQLLPDVINLLEKKGLLLYYDLVESTFDKTRLPCRKFEAMDHFQKCFAIIKLKKELAAGRVQKDWKAIRVDFVMPPIDNFAFALLGWTGSRQFERDLRRFARHERKMLLDRHALYDKTKKIFLPAKTEEDIFAHLGLDYIPPWQRNA

SEQ ID NO: 407 - protein, 362 aa, Artificial Sequence
  Modified TdT Sequence
MENLYFQGTVSQYACQRRTTMENHNQIFTDAFAILAENAEFNESEGPCLAFRRAASLLKSLPHAISSSKDLEGLPCLGDQTKAVIEDILEYGQCSKVQDVLCDDRYQTIKLFTSVFGVGLKTAEKWYRKGFHSLEEVQADKAIQFTKMQKAGFLYYDDISAAVCKAEADAIGQIVEETVRLIAPDAIVTLTGGFRRGKEIGHDVDFLITTPEMGREQLLPRVINLLEQKGLLLYYDLVESTFDKTRLPCRKFEAMDHFQKCFAIIKLKKELAAGRVQKDWKAIRVDFVMPPVDNFAFALLGWTGSRQFERDLRRFARHERKMLLDRHALYDKTKKIFLPAKTEEDIFAHLGLDYIPPWQRNA

SEQ ID NO: 408 - protein, 362 aa, Artificial Sequence
  Modified TdT Sequence
MENLYFQGTVSQYACQRRTTMENHNQIFTDAFAILAENAEFNESEGPALAFRRAASLLKSLPHAISSSKDLEGLPCLGDQTKAVIEDILEYGQCSKVQDVLCDDRYQTIKLFTSVFGVGLKTAEKWYRKGFHSLEEVQADKAIHFTKMQKAGFLYYDDISAAVCKAEADAIGCIVEETVRLIAPDAIVTLTGGFRRGKEIGHDVDFLITTPEMGKEQLLPRVINLLEKKGLLLYYDLVESTFDKTRLPCRKFEAMDHFQKCFAIIKLKKELAAGRVQKDWKAIRVDFVMPPVDNFAFALLGWTGSRQFERDLRRFARHERKMLLDRHALYDKTKKIFLPAKTEEEIFAHLGLDYIPPWQRNA

SEQ ID NO: 409 - protein, 362 aa, Artificial Sequence
  Modified TdT Sequence
MENLYFQGTVSQYACQRRTTMENHNQIFTDAFAILAENAEFNESEGPCLAFRRAASLLKSLPHAISSSKDLEGLPCLGDQTKAVIEDILEYGQCSKVQDVLCDDRYQTIKLFTSVFGVGLKTAEKWYRKGFHSLEEVQADKAIHFTKMQKAGFLYYDDISAAVCKAEADAIGQIVEETVRLIAPDAIVTLTGGFRRGKECGHDVDFLITTPEMGKEQLLPKVINLLEKKGLLLYYDLVESTFDKTRLPCRKFEAMDNFQKCFAIIKLKAELAAGRVQKDWKAIRVDFVMPPVDNFAFALLGWTGSRQFERDLRRFARHERKMLLDRHALYDKTKKIFLPAKTEEDIFAHLGLDYIPPWQRNA

SEQ ID NO: 410 - protein, 362 aa, Artificial Sequence
  Modified TdT Sequence
MENLYFQGTVSQYACQRRTTMENHNQIFTDAFAILAENAEFNENEGPALAFRRAASLLKSLPHAILSSKDLEGLPCLGDQTKAVIEDILEYGQCSKVQDVLCDDRYQTIKLFTSVFGVGLKTAEKWYRKGFHSLEEVQADKAIQFTKMQKAGFLYYDDISAAVCKAEADAIGQIVEETVRLIAPDAIVTLTGGFRRGKECGHDVDFLITTPEMGKEQLLPDVINLLEKKGLLLYYDLVESTFDKTRLPCRKFEAMDHFQKCFAIIKLKKELAAGRVQKDWKAIRVDFVMPPIDNFAFALLGWTGSRQFERDLRRFARHERKMLLDRHALYDKTKRIFLPAKTEEDIFAHLGLDYIPPWQRNA

SEQ ID NO: 411 - protein, 362 aa, Artificial Sequence
  Modified TdT Sequence
MENLYFQGTVSQYACQRRTTMENHNQIFTDAFAILAENAEFNESEGPALAFRRAASLLKSLPHAISSSKDLEGLPCLGDQTKAVIEDILEYGQCSKVQDVLCDDRYQTIKLFTSVFGVGLKTAEKWYRKGFHSLEEVQADKAIQFTKMQKAGFLYYDDISAAVCKAEADAIGQIVEETVRAIAPDAIVTLTGGFRRAKECGHDVDFLITTPEMGKEQLLPDVINLLEKKGLLLYYHLVESTFDKTRLPCRKFEAMDHFQKCFAIIKLNKELAAGRVQKDWKAIRVDFVMPPIDNFAFALLGWTGSRQFERDLRRFARHERKMLLDRHALYDKTKKIFLPAKTEEDIFAHLGLDYIPPWQRNA

SEQ ID NO: 412 - protein, 362 aa, Artificial Sequence
  Modified TdT Sequence
MENLYFQGTVSQYACQRRTTMENHNQIFTDAFAILAENAEFNESEGPCVAFRRAASLLKSLPHAISSSKDLEGLPCLGDQTKAVIEDILEYGQCSKVQDVLCDDRYQTIKLFTSVFGVGLKTAEKWYRKGFHSLEEVQADKAIHFTKMQKAGFLYYDDISAAVCKAEADAIGCIVEETVRLIAPDAIVTLTGGFRRGKEIGHDVDFLITTPEMGKEQLLPKVINLLEKKGLLLYYDLVESTFDKTRLPCRKFEAMDHFQKCFAIIKLKKELAAGRVQKDWKAIRVDFVMPPVDNFAFALLGWTGSRQFERDLRRFARHERKMLLDRHALYDKTKKIFLPAKTEEDIFAHLGLDYIPPWQRNA

SEQ ID NO: 413 - protein, 362 aa, Artificial Sequence
  Modified TdT Sequence
MENLYFQGTVSQYACQRRTTMENHNQIFTDAFAILAENAEFNESEGPCLAFRRAASLLKSLPHAISSSKDLEGLPCLGDQTKAVIEDILEYGQCSKVQDVLCDDRYKTIKLFTSVFGVGLKTAEKWYRKGFHSLEEVQADKAIHFTKMQKAGFLYYDDISAAVCKAEADAIGQIVEETVRGIAPDAIVTLTGGFRRGKEIGHDVDFLITTPEMGKEQLLPKVINLLEKKGLLLYYDLVESTFDKTRLPCRKFEAMDHFQKCFAIIKLKKELAAGRVQKDWKAIRVDFVMPPVDNFAFALLGWTGSRQFERDLRRFARHERKMLLDRHALYDKTKKIFLPAKTEEDIFAHLGLDYIPPWQRNA

SEQ ID NO: 414 - protein, 362 aa, Artificial Sequence
  Modified TdT Sequence
MENLYFQGTVSQYACQRRTTMENHNQIFTDAFAILAENAEFNESEGPCLAFRRAASLLKSLPHAISSSKDLEGLPCLGDQTKAVIEDILEYGQCSKVQDVLCDDRYQTIKLFTSVFGVGLKTAEKWYRKGFHSLEEVQADKAIHFTKMQKAGFLYYDDISAAVCKAEADAIGQIVEETVRLIAPDAIVTLTGGFRRGKEIGHDVDFLITTPEMGKEQLLPKVIDLWEKKGLLLYYDLVESTFDKTRLPCRKFEAMDHFQKCFAIIKLKKQLAAGRVQKDWKAIRVDFVMPPVDNFAFALLGWTGSRQFERDLRRFARHERKMLLDRHALYDKTKKIFLPAKTEEDIFAHLGLDYIPPWQRNA

SEQ ID NO: 415 - protein, 362 aa, Artificial Sequence
  Modified TdT Sequence
MENLYFQGTVSQYACQRRTTMENHNQIFTDAFAILAERAEFNESEGPALAFRRAASLLKSLPHAISSSKDLEGLPCLGDQTKAVIEDILEYGQCSKVQDVLCDDRYQTIKLFTSVFGVGLKTAEKWYRKGFHSLEEVQADKAIHFTKMQKAGFLYYDDISAAVCKAEADAIGQIVEETVRLIAPDAIVTLTGGFRRGKEIGHDVDFLITTPEAGKEQLLPRVINLLEKKGLLLYYDLVESTFDKTRLPCRKFEAMDHFQKCFAIIKLKKELAAGRVQKDWKAIRVDFVMPPVDNFAFALLGWTGSRQFERDLRRFARHERKMLLDRHALYDKTKKIFLPAKTEEDIFAHLGLDYIPPWQRNA

SEQ ID NO: 416 - protein, 362 aa, Artificial Sequence
  Modified TdT Sequence
MENLYFQGTVSQYACQRRTTMENHNQIFTDAFAILAENAEFNESEGPALAFRRAASLLKSLPHAISSSKDLEGLPCLGDQTKAVIEDILEYGQCSKVQDVLCDDRYQTIKLFTSVFGVGLKTAEKWYRKGFHSLEEVQADKAIQFTKMQKAGFLYYDDISAAVCKAEADAIGQIVEETVRLIAPDAIVTLTGGFRRGKECGHDVDFLITTPEAGKEQLLPKVINLLEKKGLLLYYDLVESTFDKTRLPCRKFEAMDHFQKCFAIIKLKKELAAGRVQKDWKAIRVDFVMPPVDNFAFALLGWTGSRQFERDLRRFARHERKMLLDRHALYDKTKKIFLPAKTEEEIFAHLGLDYIPPWQRNA

SEQ ID NO: 417 - protein, 362 aa, Artificial Sequence
  Modified TdT Sequence
MENLYFQGTVSQYACQRRTTMENHNKIFTDAFAILAENAEFNESEGPCLAFRRAASLLKSLPHAISSSKDLEGLPCLGDQTKAVIEDILEYGQCSKVQDVLCDDRYQTIKLFTSVFGVGLKTAEKWYRKGFHSLEEVQADKAIHFTKMQKAGFLYYDDISAAVCKAEADAIGCIVEETVRLIAPDAIVTLTGGFRRGKEIGHDVDFLITTPEMGKEQLLPRVINLLEQKGLLLYYDLVESTFDKTRLPCRKFEAMDHFQKCFAIIKLKKELAAGRVQKDWKAIRVDFVMPPVDNFAFALLGWTGSRQFERDLRRFARHERKMLLDRHALYDKTKKIFLPAKTEEDIFAHLGLDYIPPWQRNA

SEQ ID NO: 418 - protein, 362 aa, Artificial Sequence
  Modified TdT Sequence
MENLYFQGTVSQYACQRRTTMENHNQIFTDAFAILAENAEFNENEVPALAFRRAASLLKSLPHAISSSKDLEGLPCLGDQTKAVIEDILEYGQCSKVQDVLCDDRYQTIKLFTSVFGVGLKTAEKWYRKGFHSLEEVQADKAIQFTKMQKAGFLYYDDISAAVCKAEADAIGQVVEETVRLIAPDAIVTLTGGFRRGKEIGHDVDFLITTPEMGKEQLLPKLINLLEKKGLLLYYDLVESTFDKTRLPCRKFEAMDHFQKCFAIIKLKKELAAGRVQKDWKAIRVDFVMPPVDNFAFALLGWTGSRQFERDLRRFARHERKMLLDRHALYDKTKKIFLPAKTEEDIFAHLGLDYIPPWQRNA

SEQ ID NO: 419 - protein, 362 aa, Artificial Sequence
  Modified TdT Sequence
MENLYFQGTVSQYACQRRTTMENHNQIFTDAFAILAERAEFNENEGPCVAFRRAASLLKSLPHAISSSKDLEGLPCLGDQTKAVIEDILEYGQCSKVQDVLCDDRYQTIKLFTSVFGVGLKTAEKWYRKGFHSLEEVQADKAIQFTKMQKAGFLYYDDISAAVCKAEADAIGQIVEETVRLIAPDAIVTLTGGFRRGKEIGHDVDFLITTPEMGKEQLLPRVINLLEKKGLLLYYDLVESTFDKTRLPCRKFEAMDHFQKCFAIIKLKKELAAGRVQKDWKAIRVDFVMPPVDNFAFALLGWTGSRQFERDLRRFARHERKMLLDRHALYDKTKKIFLPAKTEEDIFAHLGLDYIPPWQRNA

SEQ ID NO: 420 - protein, 362 aa, Artificial Sequence
  Modified TdT Sequence
MENLYFQGTVSQYACQRRTTMENHNQIFTDAFAILAENAEFNESESPCLAFRRAASLLKSLPHAISSSKDLEGLPCLGDQTKAVIEDILEYGQCSKVQDVLCDDRYQTIKLFTSVFGVGLKTAEKWYRKGFHSLEEVQADKAIHFTKMQKAGFLYYDDISAAVCKAEADAIGQIVEETVRLIAPDAIVTLTGGFRRGKEIGHDVDFLITTPEMGKEQLLPRVINLLEKKGLLLYYDLVESTFDKTRLPCRKFEAMDHFQQCFAIIKLKKELAAGRVQKDWKAIRVDFVMPPVDNFAFALLGWTGSRQFERDLRRFARHERKMLLDRHALYDKTKKIFLPAKTEEEIFAHLGLDYIPPWQRNA

SEQ ID NO: 421 - protein, 362 aa, Artificial Sequence
  Modified TdT Sequence
MENLYFQGTVSQYACQRRTTMENHNQIFTDAFAILAENAEFNESEGPCLAFLRAASLLKSLPHAISSSKDLEGLPCLGDQTKAVIEDILEYGQCSKVQDVLCDDRYQTIKLFTSVFGVGLKTAEKWYRKGFHSFEEVQADKAIHFTKMQKAGFLYYDDISAAVCKAEADAIGQIVEETVRLIAPDAIVTLTGGFRRGKECGHDVDFLITTPEMGKEQLLPKVINLWEKKGLLLYYDLVESTFDKTRLPCRKFEAMDHFQKCFAIIKLKKQLAAGRVQKDWKAIRVDFVMPPVDNFAFALLGWTGSRQFERDLRRFARHERKMLLDRHALYDKTKKIFLPAKTEEDIFAHLGLDYIPPWQRNA

SEQ ID NO: 422 - protein, 362 aa, Artificial Sequence
  Modified TdT Sequence
MENLYFQGTVSQYACQRRTTMENHNQIFTDAFAILAENAEFNESEGPALAFRRAASLLKSLPHTISSSKDLEGLPCLGDQTKAVIEDILEYGQCSKVQDVLCDDRYQTIKLFTSVFGVGLKTAEKWYRKGFHSLEEVQADKAIQFTKMQKAGFLYYDDISAAVCKAEADAIGQIVEETVRLIAPDAIVTLTGGFRRGKECGHDVDFLITTPEQGKEQLLPDVINLLEKKGLLLYYDLVESTFDKTRLPCRKFEAMDHFQKCFAIIKLKKELAAGRVQKDWKAIRVDFVMPPADNFAFALLGWTGSRQFERDLRRFARHERKMLLDRHALYDKTKKIFLPAKTEEDIFAHLGLDYIPPWQRNA

SEQ ID NO: 423 - protein, 362 aa, Artificial Sequence
  Modified TdT Sequence
MENLYFQGTVSQYACQRRTTMENHNQIFTDAFAILAENAEFNESEGPALAFRRAASLLKSLPHAISSSKDLEGLPCLGDQTKAVIEDILEYGQCSKVQDVLCDDRYQTIKLFTSVFGVGLKTAEKWYRKGFHSLEEVQADKAIHFTKMQKAGFLYYDDISAAVCKAEADAIGQIVEETVRLIAPDAIVTLTGGFRRGKEIGHDVDFLITTPEMGKEQLLPRVINLWEKKGLLLYYDLVESTFDKTRLPCRKFEAMDHFQQCFAIIKLKKELAAGRVQKDWKAIRVDFVMPPVDNFAFALLGWTGSRQFERDLRRFARHERKMLLDRHALYDKTKKIFLPAKTEEDIFAHLGLDYIPPWQRNA

SEQ ID NO: 424 - protein, 362 aa, Artificial Sequence
  Modified TdT Sequence
MENLYFQGTVSQYACQRRTTMENHNQIFTDAFAILAENAEFNESEGPCLAFRRAASLLKSLPHAISSSKDLEGLPCLGDQTKAVIEDILEYGQCSKVQDVLCDDRYQTIKLFTSVFGVGLKTAEKWYRKGFHSLEEVQADKAIHFTKMQKAGFLYYDDISAAVCKAEADAIGQIVEETVRLIAPDAIVTLTGGFRRGKECGHDVDFLITTPGMGKEQLLPKVINLWEKKGLLLYYDLVESTFDKLRLPCRKFEAMDHFQKCFAIIKLKKELAAGRVQKDWKAIRVDFVMPPVDNFAFALLGWTGSRQFERDLRRFARHERRMLLDRHALYDKTKKIFLPAKTEEDIFAHLGLDYIPPWQRNA

SEQ ID NO: 425 - protein, 362 aa, Artificial Sequence
  Modified TdT Sequence
MENLYFQGTVSQYACQRRTTMENHNQIFTDAFAILAENAEFNESEGPCLAFRRAASLLKSLPHAISSSKDLEGLPCLGDQTKAVIEDILEYGQCSKVQDVLCDDRYQTIKLFTSVFGVGLKTAEKWYRKGFHSLEEVQADKAIQFTKMQKAGFLYYDDISAAVCKAEADAIGQIVEETVRGIAPDAIVTLTGGFRRGKEIGHDVDFLITTPEMGKEQLLPRVINLWEKKGLLLYYDLVESTFDKTRLPCRKFEAMDHFQKCFAIIKLKKELAAGRVQKDWKAIRVDFVMPPVDNFAFALLGWTGSRQFERDLRRFARHERKMLLDRHALYDKTKKIFLPAKTEEDIFAHLGLDYIPPWQRNA

SEQ ID NO: 426 - protein, 362 aa, Artificial Sequence
  Modified TdT Sequence
MENLYFQGTVSQYACQRRTTMENHNQIFTDAFAILAENAEFNESEGPALAFLRAASLLKSLPHAISSSKDLEGLPCLGDQTKAVIEDILEYGQCSKVQDVLCDDRYQTIKLFTSVFGVGLKTAEKWYRKGFHSLEEVQADKAIQFTKMQKAGFLYYDDISAAVCKAEADAIGQIVEETVRLIAPDAIVTLTGGFRRGKEIGHDVDFLITTPEAGKEQLLPKVINLLEKKGLLLYYDLVESTFDKTRLPCRKFEAMDHFQKCFAIIKLKKELAAGRVQKDWKAIRVDFVMPPVDNFAFALLGWTGSRQFERDLRRFARHERKMLLDRHALYDKTKKIFLPAKTEEEIFAHLGLDYIPPWQRNA

SEQ ID NO: 427 - protein, 362 aa, Artificial Sequence
  Modified TdT Sequence
MENLYFQGTVSQYACQRRTTMENHNQIFTDAFAILAENAEFNESEGPALAFRRAASLLKSLPHAISSSKDLEGLPCLGDQTKAVIEEIYEYGQCSKVQDVLCDDRYQTIKLFTSVFGVGLKTAEKWYRKGFHSLEEVQADKAIQFTKMQKAGFLYYDDISAAVCKAEADAIGQIVEETVRLIAPDAIVTLTGGFRRGKECGHDVDFLITTPEMGKEQLLPKVINLLEKKGLLLYYDLVESTFDKTRLPCRKFEAMDHFQKCFAIIKLKKELAAGRVQKDWKAIRVDFVMPPIDNFAFALLGWTGSRQFERDLRRFARHERKMLLDRHALYDKTKKIFLPAKTEEDIFAHLGLDYIPPWQRNA

SEQ ID NO: 428 - protein, 362 aa, Artificial Sequence
  Modified TdT Sequence
MENLYFQGTVSQYACQRRTTMENHNQIFTDAFAILAENAEFNESEGPCLAFRRAASLLKSLPHAISSSKDLEGLPCLGDQTKAVIEDILEYGQCSKVQDVLCDDRYQTIKLFTSVFGVGLKTAEKWYRKGFHSLEEVQADKAIHFTKMQKAGFLYYDDISAAVCKAEADAIGQIVEETVRLIAPDAIVTLTGGFRRGKECGHDVDFLITTPEMGKEQLLPKVINLWEKKGLLLYYDLVESTFDKTRLPCRKFEAMDHFQKCFAIIKLKKELADGRVQKDWKAIRVDFVLPPVDNFAFALLGWTGSRQFERDLRRFARHERRMLLDRHALYDKTKKIFLPAKTEEDIFAHLGLDYIPPWQRNA

SEQ ID NO: 429 - protein, 362 aa, Artificial Sequence
  Modified TdT Sequence
MENLYFQGTVSQYACQRRTTMENHNQIFTDAFAILAENAEFNESEGPCLAFRRAASLLKSLPHAISSSKDLEGLPCLGDQTKAVIEDILEYGQCSKVQDVLCDDRYKTIKLFTSVFGVGPKTAEKWYRKGFHSLEEVQADKAIHFTKMQKAGFLYYDDISAAVCKAEADAIGQIVEETVRLIAPDAIVTLTGGFRRGKEIGHDVDFLITTPEMGKEQLLPRVINLLEKKGLLLYYDLVESTFDKTRLPCRKFEAMDHFQKCFAIIKLKKELAAGRVQKDWKAIRVDFVMPPVDNFAFALLGWTGSRQFERDLRRFARHERKMLLDRHALYDKTKKIFLPAKTEEDIFAHLGLDYVPPWQRNA

SEQ ID NO: 430 - protein, 362 aa, Artificial Sequence
  Modified TdT Sequence
MENLYFQGTVSQYACQRRTTMENHNQIFTDAFAILAENAEFNENEGPALAFRRAASLLKSLPHAISSSKDLEGLPCLGDQTKAVIEDILEYGQCSKVQDVLCDDRYQTIKLFTSVFGVGLKTAEKWYRKGFHSLEEVQADKAIQFTKMQRAGFLYYDDISAAVCKAEADAIGQIVEETVRLIAPDAIVTLTGGFRRGKECGHDVDFLITTPEMGKEQLLPKVINLLEKKGLLLYYDLVESTFDKTRLPCRKFEAMDHFQKCFAIIKLKKELAAGRVQKDWKAIRVDFVMPPVDNFAFALLGWTGSRQFERDLRRFARHERKMLLDRHALYDKTKRIFLPAKTEEDIFAHLGLDYIPPWQRNA

SEQ ID NO: 431 - protein, 362 aa, Artificial Sequence
  Modified TdT Sequence
MENLYFQGTVSQYACQRRTTMENHNQIFTDAFAILAENAEFNESEGPCLAFRRAASLLKSLPHAISSSKDLEGLPCLGDRTKAVIEDILEYGQCSKVQDVLCDDRYQTIKLFTSVFGVGLKTAEKWYRMGFHSLEEVQADKAIHFTKMQKAGFLYYDDISAAVCKAEADAIGQIVEETVRLIAPDAIVTLTGGFRRGKECGHDVDFLITTPEMGKEQLLPKVINLWEKKGLLLYYDLVESTFDKTRLPCRKFEAMDHFQKCFAIIKLKAELAAGRVQKDWKAIRVDFVMPPVDNFAFALLGWTGSRQFERDLRRFARHERKMLLDRHALYDKTKKIFLPAKTEEDIFAHLGLDYIPPWQRNA

SEQ ID NO: 432 - protein, 362 aa, Artificial Sequence
  Modified TdT Sequence
MENLYFQGTVSQYACQRRTTMENHNQIFTDAFAILAENAEFNESEGPALAFRRAASLLKSLPHAISSSKDLEGLPCLGDQTKAVIEDILEYGQCSKVQDVLCDDRYQTIKLFTSVFGVGLKTAEKWYRKGFHSLEEVQADKAIHFTKMQKAGFLYYDDISAAVCKAEADAIGQIVEETVRLIAPDAIVTLTGGFRRGKEIGHDVDFLITTPEMGKEQLLPRLINLLEKKGLLLYYDLVESTFDKTRLPCRKFEAMDHFQKCFAIIKLKQELAAGRVQKDWKAIRVDFVMPPVDNFAFALLGWTGSRQFERDLRRFARHERKMLLDRHALYDKTKKIFLPAKTEEDIFAHLGLDYIPPWQRNA

SEQ ID NO: 433 - protein, 362 aa, Artificial Sequence
  Modified TdT Sequence
MENLYFQGTVSQYACQRRTTMENHNQIFTDAFAILAENAEFNESEGPALAFRRAASLLKSLPHTISSSKDLEGLPCLGDQTKAVIEDILEYGQCSKVQDVLCDDRYQTIKLFTSVFGVGLKTAEKWYRKGFHSLEEVQADKAIQFTKMQKAGFLYYDDISAAVCKAEADAIGQIVEETVRKIAPDAIVTLTGGFRRGKECGHDVDFLITTPEMGKEQLLPDVINLLEKKGLLLYYDLIESTFDKTRLPCRKFEAMDHFQKCFAIIKLKKELAAGRVQKDWKAIRVDFVMPPIDNFAFALLGWTGSRQFERDLRRFARHERKMLLDRHALYDKTKKIFLPAKTEEDIFAHLGLDYIPPWQRNA

SEQ ID NO: 434 - protein, 362 aa, Artificial Sequence
  Modified TdT Sequence
MENLYFQGTVSQYACQRRTTMENHNQIFTDAFAILAENAEFNESEGPALAFRRAASLLKSLPHAISSSKDLEGLPCLGDQTKAVIEDILEYGQCSKVQDVLCDDRYQTIKLFTSVFGVGLKTAEKWYRKGFHSLEEVQADKAIHFTKMQKAGFLYYDDISAAVCKAEADAIGQIVEETVRLIAPDAIVALTGGFRRGKEIGHDVDFLITTPEMGKEQLLPRVINLLEKKGLLLYYDLVESTFDKTRLPCRKFEAMDHFQKCFAIIKLKKELAAGRVQKDWKAIRVDFVMPPVDNFAFALLGWTGSRQFERDLRRFARHERKMLLDRHALYDKTKKIFLPAKTEEDIFAHLGLDYVPPWQRNA

SEQ ID NO: 435 - protein, 362 aa, Artificial Sequence
  Modified TdT Sequence
MENLYFQGTVSQYACQRRTTMENHNQIFTDAFAILAENAEFNESEGPCLAFRRAASLLKSLPHAISCSKDLEGLPCLGDQTKAVIEDILEYGQCSKVQDVLCDDRYQTIKLFTSVFGVGLKTAEKWYRKGFHSLEEVQAEKAIHFTKMQKAGFLYYDDISAAVCKAEADAIGQIVEETVRLIAPDAIVTLTGGFRRGKECGHDVDFLITTPEMGKEQLLPKVINLWEKKGLLLYYDLVESTFDKTRLPCRKFEAMDHFQKCFAIIKLKKELAAGRVQKDWKAIRVDFVMPPVDNFAFALLGWTGSRQFERDLRRFARHERKMLLDRHALYDKRKKIFLPAKTEEDIFAHLGLDYIPPWQRNA

SEQ ID NO: 436 - protein, 362 aa, Artificial Sequence
  Modified TdT Sequence
MENLYFQGTVSQYACQRRTTLENHNQIFTDAFAILAENAEFNESEGPALAFRRAASLLKSLPHAISSSKDLEGLPCLGDQTKAVIEEILEYGQCSKVQDVLCDDRYQTIKLFTSVFGVGLKTAEKWYRKGFHSLEEVQADKAIHFTKMQKAGFLYYDDISAAVCKAEADAIGQIVEETVRLIAPDAIVTLTGGFRRGKECGHDVDFLITTPEMGKEQLLPDVINLLEKKGLLLYYDLVESTFDKTRLPCRKFEAMDHFQKCFAIIKLKKELAAGRVQKDWKAIRVDFVMPPIDNFAFALLGWTGSRQFERDLRRFARHERKMLLDRHALYDKTKKIFLPAKTEEDIFAHLGLDYIPPWQRNA

SEQ ID NO: 437 - protein, 362 aa, Artificial Sequence
  Modified TdT Sequence
MENLYFQGTVSQYACQRRTTMENHNQIFTDAFAILAENAEFNESEGPALAFRRAASLLKSLPHAISSSKDLEGLPCLGDQTKAVIEDILEYGQCSKVQDVLCDDRYQTIKLFTSVFGVGLKTAEKWYRKGFHSLEEVQADKAIHFTKMQKAGFLYYDDISAAVCKAEADAIGQIVEETVRLIAPDAIVTLTGGFRRGKEIGHDVDFLITTPEMGKEQLLPRVINLLEKKGLLLYYDLVESTFDKTRLPCRKFEAMDHFQKCFAIIKLKKELAAGRVQKDWKAIRVDFVMPPVDCFAFALLGWTGSRQFERDLRRFARHERKMLLDRHALYDKTKRIFLPAKTEEDIFAHLGLDYIPPWQRNA

SEQ ID NO: 438 - protein, 362 aa, Artificial Sequence
  Modified TdT Sequence
MENLYFQGTVSQYACQRRTTMENHNKIFTDAFAILAENAEFNESEGPCLAFRRAASLLKSLPHAISSSKDLEGLPCLGDQTKAVIEDILEYGQCSKVQDVLCDDRYKTIKLFTSVFGVGLKTAEKWYRKGFHSLEEVQADKAIQFTKMQKAGFLYYDDISAAVCKAEADAIGQIVEETVRLIAPDAIVTLTGGFRRGKEIGHDVDFLITTPEMGKEQLLPRVINLLEKKGLLLYYDLVESTFDKTRLPCRKFEAMDHFQKCFAIIKLKKELAAGRVQKDWKAIRVDFVMPPVDNFAFALLGWTGSRQFERDLRRFARHERKMLLDRHALYDKTKKIFLPAKTEEDIFAHLGLDYIPPWQRNA

SEQ ID NO: 439 - protein, 362 aa, Artificial Sequence
  Modified TdT Sequence
MENLYFQGTVSQYACQRRTTMENHNQIFTDAFAILAENAEFNESEGPALAFRRAASLLKSLPHAISSSKDLEGLPCLGDQTKAVIEEILEYGQCSKVQDVLCDDRYQTIKLFTSVFGVGLKTAEKWYRKGFHSLEEVQADKAIQFTKMQKAGFLYYDDISAAVCKAEADAIGQIVEETVRLIAPDALVTLTGGFRRGKEIGHDVDFLITTPEMGKEQLLPKVINLLEKKGLLLYYDLIESTFDKTRLPCRKFEAMDHFQKCFAIIKLKKELAAGRVQKDWKAIRVDFVMPPVDNFAFALLGWTGSRQFERDLRRFARHERKMLLDRHALYDKTKKIFLPAKTEEDIFAHLGLDYIPPWQRNA

SEQ ID NO: 440 - protein, 362 aa, Artificial Sequence
  Modified TdT Sequence
MENLYFQGTVSQYACQRRTTMENHNQIFTDAFAILAENAEFNESEGPALAFRRAASLLKSLPHAISSSKDLEGLPCLGDQTKAVIEDILEYGQCSKVQDVLCDDRYQTIKLFTSVFGVGLKTAEKWYRMGFHSLEEVQADKAIQFTKMQKAGFLYYDDISAAVCKAEADAIGQIVEETVRLIAPDAIVTLTGGFRRGKEIGHDVDFLITTPEMGKEQLLPKLINLLEKKGLLLYYDLVESTFDKTRLPCRKFEAMDHFQKCFAIIKLKKELAAGRVQKDWKAIRVDFVMPPVDNFAFALLGWTGSRQFERDLRRFARHERKMLLDRHALYDKTKKIFLPAKTEEEIFAHLGLDYIPPWQRNA

SEQ ID NO: 441 - protein, 362 aa, Artificial Sequence
  Modified TdT Sequence
MENLYFQGTVSQYACQRRTTMENHNQIFTDAFAILAENAEFNENEGPALAFRRAASLLKSLPHAISSSKDLEGLPCLGDQTKAVIEDILEYGQCSKVQDVLCDDRYQTIKLFTSVFGVGLKTAEKWYRKGFHSLEEVQADKAIHFTKMQKAGFLYYDDISAAVCKAEADAIGQIVEETVRLIAPDAIVTLTGGFRRGKEIGHDVDFLITTPEMGKEQLLPRVINLLEKKGLLLYYDLVESTFDKTRLPCRKFEAMDHFQKCFAIIKLKKELAAGRVQKDWKAIRVDFVLPPVDNFAFALLGWTGSRQFERDLRRFARHERKMLLDRHALYDKTKKIFLPAKTEEDIFAHLGLDYIPPWQRNA

SEQ ID NO: 442 - protein, 362 aa, Artificial Sequence
  Modified TdT Sequence
MENLYFQGTVSQYACQRRTTMENHNQIFTDAFAILAENAEFNESEGPALAFRRAASLLKSLPHAISSSKDLEGLPCLGDQTKAVIEEILEYGQCSKVQEVLCDDRYQTIKLFTSVFGVGLKTAEKWYRKGFHSLEEVQADKAIQFTKMQKAGFLYYDDISAAVCKAEADAIGQIVEETVRKIAPDAIVTLTGGFRRGKECGHDVDFLITTPEMGKEQLLPDVINLLEKKGLLLYYDLVESTFDKTRLPCRKFEAMDHFQKCFAIIKLKKELAAGRVQKDWKAIRVDFVMPPIDNFAFALLGWTGSRQFERDLRRFARHERKMLLDRHALYDKTKKIFLPAKTEEDIFAHLGLDYIPPWQRNA

SEQ ID NO: 443 - protein, 362 aa, Artificial Sequence
  Modified TdT Sequence
MENLYFQGTVSQYACQRRTTMENHNQIFTDAFAILAENAEFNESEGPCLAFRRAASLLKSLPHAISSSKDLEGLPCLGDQTKAVIEDILEYGQCSKVQDVLCDDRYQTIKLFTSVFGVGLKTAEKWYRKGFHTLEEVQADKAIHFTKMQKAGFLYYDDISAAVCKAEADAIGQIVEETVRGIAPDAIVTLTGGFRRGKEIGHDVDFLITTPEMGKEQLLPRVINLLEKKGLLLYYDLVESTFDKTRLPCRKFEAMDHFQKCFAIIKLKKELAAGRVQKDWKAIRVDFVMPPVDNFAFALLGWTGSRQFERDLRRFARHERKMLLDRHALYDRTKKIFLPAKTEEDIFAHLGLDYIPPWQRNA

SEQ ID NO: 444 - protein, 362 aa, Artificial Sequence
  Modified TdT Sequence
MENLYFQGTVSQYACQRRTTMENHNQIFTDAFAILAENAEFNENEGPALAFRRAASLLKSLPHAISSSKDLEGLPCLGDQTKAVIEDILEYGQCSKVQDVLCDDRYQTIKLFTSVFGVGLKTAEKWYRKGFHSLEEVQADKAIQFTKMQKAGFLYYDDISAAVCKAEADAIGQIVEETVRLIAPDAIVTLTGGFRRGKEIGHDVDFIITTPEMGKEQLLPKVINLLEKKGLLLYYDLVESTFDKTRLPCRKFEAMDHFQKCFAIIKLKKELAAGRVQKDWKAIRVDFVMPPVDNFAFALLGWTGSRQFERDLRRFARHERKMLLDRHALYDRTKKIFLPAKTEEEIFAHLGLDYIPPWQRNA

SEQ ID NO: 445 - protein, 362 aa, Artificial Sequence
  Modified TdT Sequence
MENLYFQGTVSQYACQRRTTMENHNQIFTDAFAILAENAEFNESEGPALAFRRAASLLKSLPHAISSSKDLEGLPCLGDQTKAVIEDILEYGQCSKVQDVLCDDRYQTIKLFTSVFGVGLKTAEKWYRKGFHSLEEVQADKAIQFTKMQKAGFLYYDDISAAVCKAEADAIGCVVEETVRLIAPDAIVTLTGGFRRGKEIGHDVDFLITTPEQGKEQLLPKVINLLEQKGLLLYYDLVESTFDKTRLPCRKFEAMDHFQKCFAIIKLKKELAAGRVQKDWKAIRVDFVMPPVDNFAFALLGWTGSRQFERDLRRFARHERKMLLDRHALYDKTKKIFLPAKTEEDIFAHLGLDYIPPWQRNA

SEQ ID NO: 446 - protein, 362 aa, Artificial Sequence
  Modified TdT Sequence
MENLYFQGTVSQYACQRRTTMENHNQIFTDAFAILAENAEFNESEGPALAFRRAASLLKSLPHAISSSKDLEGLPCLGDQTKAVIEDILEYGQCSKVQDVLCDDRYQTIKLFTSVFGVGLKTAEKWYRKGFHSLEEVQADKAIQFTKMQKAGFLYYDDISAAVCKAEADAIGQIVEETVRLIAPDAIVTLTGGFRRGKEIGHDVDFLITTPEMGKEQLLPKVINLLEKKGLLLFYDLVESTFDKTRLPCRKFEAMDHFQKCFAIIKLKKELAAGRVQKDWKAIRVDFVMPPIDNFAFALLGWTGSRQFERDLRRFARHERKMLLDRHALYDKTKKIFLPAKTEEEIFAHLGLDYIPPWQRNA

SEQ ID NO: 447 - protein, 362 aa, Artificial Sequence
  Modified TdT Sequence
MENLYFQGTVSQYACQRRTTMENHNQIFTDAFAILAENAEFNESEGPSLAFRRAASLLKSLPHAISSSKDLEGLPCLGDQTKAVIEDILEYGQCSKVQDVLCDDRYQTIKLFTSVFGVGLKTAEKWYRKGFHSLEEVQADKAIQFTKMQKAGFLYYDDISAAVCKAEADAIGQIVEETVRLIAPDAIVTLTGGFRRGKEIGHDVDFLITTPEMGKEQLLPKVINLLEKKGLLLYYDLVESTFDKTRLPCRKFEAMDHFQKCFAILKLKKELAAGRVQKDWKAIRVDFVMPPVDNFAFALLGWTGSRQFERDLRRFARHERKMLLDRHALYDKTKKIFLPAKSEEDIFAHLGLDYIPPWQRNA

SEQ ID NO: 448 - protein, 362 aa, Artificial Sequence
  Modified TdT Sequence
MENLYFQGTVSQYACQRRTTMENHNQIFTDAFAILAENAEFNESEGPCLAFRRAASLLKSLPHAISSSKDLEGLPCLGDQTKAVIEDILEYGQCSKVQDVLCDDRYQTIKLFTSVFGVGLKTAEKWYRKGFHSLEDVQADKAIHFTKMQKAGFLYYDDISAAVCRAEADAIGQIVEETVRLIAPDAIVTLTGGFRRGKECGHDVDFLITTPEMGKEQLLPKVIRLWEKKGLLLYYDLVESTFDKTRLPCRKFEAMDHFQKCFAIIKLKKELAAGRVQKDWKAIRVDFVMPPVDNFAFALLGWTGSRQFERDLRRFARHERKMLLDRHALYDKTKKIFLPAKTEEDIFAHLGLDYIPPWQRNA

SEQ ID NO: 449 - protein, 362 aa, Artificial Sequence
  Modified TdT Sequence
MENLYFQGTVSQYACQRRTTMENHNQIFTDAFAILAENAEFNESEGPCLAFRRAASLLKSLPHAISSSKDLEGLPCLGDQTKAVIEDILEYGQCSKVQDVLCDDRYQTIKLFTSVFGVGLKTAEKWYRKGFHSLEEVQADKAIHFTKMQKAGFLYYDDISAAVCKAEADAIGQIVEETVRLIAPDAIVTLTGGFRRGKEIGHDVDFLITTPEMGKEQLLPRVINLLEKKGLLLYYDLVESTFDKTRLPCRKFEAMDHFQKCFAIIKLKKELAAGRVQKDWKAIRVDFVMPPVDNFAFALLGWTGSRQFERDLRRFARHERKMLLDRHALYDKTKKIFLPAKTEEDIFAHLGLDYIPPWQRNA

SEQ ID NO: 450 - protein, 362 aa, Artificial Sequence
  Modified TdT Sequence
MENLYFQGTVSQYACQRRTTMENHNQIFTDAFAILAENAEFNESEGPALAFRRAASLLKSLPHAISSSKDLEGLPCLGDQTKAVIEDIYEYGQCSKVQDVLCDDRYQTIKLFTSVFGVGLKTAEKWYRKGFHSLEEVQADKAIQFTKMQKAGFLYYDDISAAVCKAEADAIGQIVEETVHLIAPDAIVTLTGGFRRGKECGHDVDFLITTPEKGKEQLLPDVINLLEKKGLLLYYDLVESTFDKTRLPCRKFEAMDHFQKCFAIIKLKKELAAGRVQKDWKAIRVDFVMPPADNFAFALLGWTGSRQFERDLRRFARHERKMLLDRHALYDKTKKIFLPAKTEEDIFAHLGLDYIPPWQRNA

SEQ ID NO: 451 - protein, 362 aa, Artificial Sequence
  Modified TdT Sequence
MENLYFQGTVSQYACQRRTTMENHNQIFTDAFAILAENAEFNESEGPCLAFRRAASLLKSLPHAISSSKDLEGLPCLGDQTKAVIEDILEYGQCSKVQDVLCDDRYQTIKLFTSVFGVGPKTAEKWYRKGFHSLEEVQADKAIHFTKMQKAGFLYYDDISAAVCKAEADAIGQIVEETVRLIAPDAIVTLTGGFRRGKEIGHDVDFLITTPEMGREQLLPRVINLWEKKGLLLYYDLVESTFDKTRLPCRKFEAMDHFQKCFAIIKLKKELAAGRVQKDWKAIRVDFVMPPVDNFAFALLGWTGSRQFERDLRRFARHERKMLLDRHALYDKTKKIFLPAKTEEDIFAHLGLDYIPPWQRNA

SEQ ID NO: 452 - protein, 362 aa, Artificial Sequence
  Modified TdT Sequence
MENLYFQGTVSQYACQRRTTMENHNQIFTDAFAILAENAEFNESEGPCLAFRRAASLLKSLPHAISSSKDLEGLPCLGDQTKAVIEDILEYGQCSKVQDVLCDDRYQTIKLFTSVFGVGLKTAEKWYRKGFHSLEEVQADKAIHFTKMQKAGFLYYDDISAAVCRAEADAIGQIVEETVRLIAPDAIVTLTGGFRRGKEIGHDVDFLITTPEMGKEQLLPKVINLWEKKGLLLYYDLVESTFDKTRLPCRKFEAMDHFQKCFAIIKLKKELAAGRVQKDWKAIRVDFVMPPIDNFAFALLGWTGSRQFERDLRRFARHERKMLLDRHALYDKTKKIFLPAKTEEDIFAHLGLDYIPPWQRNA

SEQ ID NO: 453 - protein, 362 aa, Artificial Sequence
  Modified TdT Sequence
MENLYFQGTVSQYACQRRTTMENRNQIFTDAFAILAENAEFNESEGPALAFRRAASLLKSLPHAISSSKDLEGLPCLGDQTKGVIEDILEYGQCSKVQDVLCDDRYQTIKLFTSVFGVGLKTAEKWYRKGFHSLEEVQADKAIQFTKMQKAGFLYYDDISAAVCKAEADAIGQIVEETVRLIAPDAIVTLTGGFRRGKECGHDVDFIITTPEMGKEQLLPDVINLLEKKGLLLYYDLVESTFDKTRLPCRKFEAMDHFQKCFAIIKLKKELAAGRVQKDWKAIRVDFVMPPIDNFAFALLGWTGSRQFERDLRRFARHERKMLLDRHALYDKTKKIFLPAKTEEDIFAHLGLDYIPPWQRNA

SEQ ID NO: 454 - protein, 362 aa, Artificial Sequence
  Modified TdT Sequence
MENLYFQGTVSQYACQRRTTMENHNQIFTDAFAILAENAEFNESEGPALAFRRAASLLKSLPHAISSSKDLEGLPCLGDQTKAVIEDILEYGQCSKVQDVLCDDRYQTIKLFTSVFGVGLKTAEKWYRKGFHSLEEVQADKAIQFTKMQKAGFLYYDDISAAVCKAEADAIGQIVEETVHLIAPDAIVTLTGGFRRGKEIGHDVDFLITTPEAGKEQLLPKVINLLEKKGLLLYYDLVESTFDKTRLPCRKFEAMDHFQKCFAIIKLKKELADGRVQKDWKAIRVDFVMPPIDNFAFALLGWTGSRQFERDLRRFARHERKMLLDRHALYDKTKKIFLPAKTEEDIFAHLGLDYIPPWQRNA

SEQ ID NO: 455 - protein, 362 aa, Artificial Sequence
  Modified TdT Sequence
MENLYFQGTVSQYACQRRTTMENHNQIFTDAFAILAENAEFNESEGPALAFRRAASLLKSLPHAISSSKDLEGLPCLGDQTKAVIEDILEYGQCSKVQDVLCDDRYQTIKLFTSVFGVGLKTAEKWYRKGFHSLEEVQADKAIQFTKMQKAGFLYYDDISAAVCKAEADAIGQIVEETVRLIAPDALVTLTGGFRRGKEIGHDVDFIITTPEMGREQLLPKVINLLEQKGLLLYYDLVESTFDKTRLPCRKFEAMDHFQKCFAIIKLKKELAAGRVQKDWKAIRVDFVMPPVDNFAFALLGWTGSRQFERDLRRFARHERKMLLDRHALYDKTKKIFLPAKTEEDIFAHLGLDYIPPWQRNA

SEQ ID NO: 456 - protein, 362 aa, Artificial Sequence
  Modified TdT Sequence
MENLYFQGTVSQYACQRRTTMENHNQIFTDAFAILAENAEFNESEGPCLAFRRAASLLKSLPHAISSSKDLEGLPCLGDQTKAVIEDILEYGQCSKVQDVLCDDRYQTIKLFTSVFGVGLKTAEKWYRKGFHSLEEVQADNAIHFSKMQKAGFLYYDDISAAVCKAEADAIGQIVEETVRLITPDAIVTLTGGFRRGKECGHDVDFLITTPEMGKEQLLPKVINLWEKKGLLLYYDLVESTFDKTRLPCRKFEAMDHFQKCFAIIKLKKELAAGRVQKDWKAIRVDFVMPPVDNFAFALLGWTGSRQFERDLRRFARHERKMLLDRHALYDKTKKIFLPAKTEEDIFAHLGLDYIPPWQRNA

SEQ ID NO: 457 - protein, 362 aa, Artificial Sequence
  Modified TdT Sequence
MENLYFQGTVSQYACQRRTTMENHNQIFTDAFAILAENAEFNESEGPALAFRRAASLLKSLPHAISSSKDLEGLPCLGDQTKAVIEDILEYGQCSKVQDVLCDDRYKTIKLFTSVFGVGLKTAEKWYRKGFHSLEEVQADKAIQFTKMQKAGFLYYDDISAAVCKAEADAIGQIVEETVRLIAPDAIVTLTGGFRRGKEIGHDVDFLITTPEMGKEQLLPKVINLLEKKGLLLYYDLVESTFDKTRLPCRKFEAMDHFQKCFAIIKLKKELADGRVQKDWKAIRVDFVMPPVDNFAFALLGWTGSRQFERDLRRFARHERKMLLDRHALYDKTKKIFLPAKTEEEIFAHLGLDYIPPWQRNA

SEQ ID NO: 458 - protein, 362 aa, Artificial Sequence
  Modified TdT Sequence
MENLYFQGTVSQYACQRRTTMENHNQIFTDAFAILAENAEFNESEGPCLAFRRAASLLKSLPHAISSSKDLEGLPCLGDQTKAVIEDILEYGQCSKVQDVLCDDRYQTIKLFTSVFGVGLKTAEKWYRKGFHSLEEVQADKAIHFTKMQKAGFLYYDDISAAVCKAEADAIGRIVEETVRLIAPDAIVTLTGGFRRGKECGHDVDFLITTPEMGKEQLLPKVINLWEKKGLLLYYDLVESTFDKSRLPCRKFEAMDHFQKCFAIIKLKKELAAGRVQKDWKAIRVDFVLPPVDNFAFALLGWTGSRQFERDLRRFARHERKMLLDRHALYDKTKKIFLPAKTEEDIFAHLGLDYIPPWQRNA

SEQ ID NO: 459 - protein, 362 aa, Artificial Sequence
  Modified TdT Sequence
MENLYFQGTVSQYACQRRTTMENHNQIFTDAFAILAENAEFNESEGPCLAFRRAASLLKSLPHAISSSKDLEGLPCLGDQTKAVIEDILEYGQCSKAQDVLCDDRYQTIKLFTSVFGVGLKTAEKWYRKGFHSLEEVQADKAIHFTKMQKAGFLYYDDISAAVCKAEADAIGQIVEETVRLITPDAIVTLTGGFRRGKECGHDVDFLITTPEMGKEQLLPKIINLWEKKGLLLYYDLVESTFDKTRLPCRKFEAMDHFQKCFAIIKLKKELAAGRVQKDWKAIRVDFVMPPVDNFAFALLGWTGSRQFERDLRRFARHERKMLLDRHALYDKTKKIFLPAKTEEDIFAHLGLDYIPPWQRNA

SEQ ID NO: 460 - protein, 362 aa, Artificial Sequence
  Modified TdT Sequence
MENLYFQGTVSQYACQRRTTMENHNQIFTDAFAILAENAEFNESEGPALAFRRAASLLKSLPHAISSLKDLEGLPCLGDQTKAVIEDILEYGQCSKVQDVLCDDRYQTIKLFTSVFGVGLKTAEKWYRKGFHSLEEVQADKAIQFTKMQKAGFLYYDDISAAVCKAEADAIGQIVEETVRLIAPDALVTLTGGFRRGKECGHDVDFLITTPEKGKEQLLPDVINLLEKKGLLLYYDLVESTFDKTRLPCRKFEAMDHFQKCFAIIKLKKELAAGRVQKDWKAIRVDFVMPPIDNFAFALLGWTGSRQFERDLRRFARHERKMLLDRHALYDKTKKIFLPAKTEEDIFAHLGLDYIPPWQRNA

SEQ ID NO: 461 - protein, 362 aa, Artificial Sequence
  Modified TdT Sequence
MENLYFQGTVSQYACQRRTTMENHNQIFTDAFAILAENAEFNESEGPALAFRRAASLLKSLPHAISSSKDLEGLPCLGDQTKAVIEDILEYGQCSKVQDVLCDDRYQTIKLFTSVFGVGLKTAEKWYRKGFHSLEEVQADKAIQFTKMQKAGFLYYDDISAAVCKAEADAIGQIVEETVRLIAPDAIVTLTGGFRRAKECGHDVDFLITTPEQGKEQLLPDVINLLEKKGLLLYYDLVESTFDKTRLPCRKFEAMDHFQKCFAIIKLKKERAAGRVQKDWKAIRVDFVMPPIDNFAFALLGWTGSRQFERDLRRFARHERKMLLDRHALYDKTKKIFLPAKTEEDIFAHLGLDYIPPWQRNA

SEQ ID NO: 462 - protein, 362 aa, Artificial Sequence
  Modified TdT Sequence
MENLYFQGTVSQYACQRRTTTENHNQIFTDAFAILAENAEFNESEGPALAFRRAASLLKSLPHAISSSKDLEGLPCLGDQTKAVIEDILEYGQCSKVQDVLCDDRYQTIKLFTSVFGVGLKTAEKWYRKGFHSLEEVQADKSIQFTKMQKAGFLYYDDISAAVCKAEADAIGQIVEETVRLIAPDAIVTLTGGFRRGKECGHDVDFLITTPEMGKEQLLPDVINLLEKKGLLLYYDLVESTFDKTRLPCRKFEAMDHFQKCFAIIKLKKELAAGRVQKDWKAIRVDFVMPPIDNFAFALLGWTGSRQFERDLRRFARHERKMLLDRHALYDKTKKIFLPAKTEEDIFAHLGLEYIPPWQRNA

SEQ ID NO: 463 - protein, 362 aa, Artificial Sequence
  Modified TdT Sequence
MENLYFQGTVSQYACQRRTTTENHNQIFTDAFAILAENAEFNESEGPALAFRRAASLLKSLPHAILSSKDLEGLPCLGDQTKAVIEEILEYGQCSKVQDVLCDDRYQTIKLFTSVFGVGLKTAEKWYRKGFHSLEEVQADKAIQFTKMQKAGFLYYDDISAAVCKAEADAIGHIVEETVRLIAPDAIVTLTGGFRRGKECGHDVDFLITTPEMGKEQLLPDVINLLEKKGLLLYYDLVESTFDKTRLPCRKFEAMDHFQKCFAIIKLKKELAAGRVQKDWKAIRVDFVMPPIDNFAFALLGWTGSRQFERDLRRFARHERKMLLDRHALYDKTKKIFLPAKTEEDIFAHLGLDYIPPWQRNA

SEQ ID NO: 464 - protein, 362 aa, Artificial Sequence
  Modified TdT Sequence
MENLYFQGTVSQYACQRRTTMENHNQIFTDAFAILAENAEFNESEGPSLAFRRAASLLKSLPHAISSSKDLEGLPCLGDQTKAVIEDILEYGQCSKVQDVLCDDRYQTIKLFTSVFGVGLKTAEKWYRKGFHSLEEVQADKAIQFTKMQRAGFLYYDDISAAVCKAEADAIGQIVEETVRLIAPDAIVTLTGGFRRGKEIGHDVDFLITTPEMGKEQLLPKLINLLEKKGLLLYYDLVESTFDKTRLPCRKFEAMDHFQKCFAIIKLKKELAAGRVQKDWKAIRVDFVMPPVDNFAFALLGWTGSRQFERDLRRFARHERKMLLDRHALYDKTKKIFLPAKTEEDIFAHLGLDYIPPWQRNA

SEQ ID NO: 465 - protein, 362 aa, Artificial Sequence
  Modified TdT Sequence
MENLYFQGTVSQYACQRRTTMENHNQIFTDAFAILAENAEFNESEGPCLAFRRAASLLKSLPHAISSSKDLEGLPCLGDQTKAVIEDILEYGQCSKVQDVLCDDRYQTIKLFTSVFGVGLKTAEKWYRKGFHSLEEVQANKAIHFTKMQKAGFLYYDDISAAVCKAEADAIGQIVEETVRLIAPDAIVTLTGGFRRGKECGHDVDFLITTPEMGKEQLLPKVVNLWEKKGLLLYYDLVESTFDKTRLPCRKFEAMDHFQKCFAIIKLKKELAAGRVQKDWKAIRVDFVMPPVDNYAFALLGWTGSRQFERDLRRFARHERKMLLDRHALYDKTKKIFLPAKTEEDIFAHLGLDYIPPWQRNA

SEQ ID NO: 466 - protein, 362 aa, Artificial Sequence
  Modified TdT Sequence
MENLYFQGTVSQYACQRRTTMENHNQIFTDAFAILAENAEFNESEGPCVAFRRAASLLKSLPHAISSSKDLEGLPCLGDQTKAVIEDILEYGQCSKVQDVLCDDRYQTIKLFTSVFGVGLKTAEKWYRKGFHSLEEVQADKAIHFTKMQKAGFLYYDDISAAVCKAEADAIGQIVEETVRLIAPDAIVTLTGGFRRGKECGHDVDFLITTPEMGKEQLLPRVINLLEKKGLLLYYDLVESTFDKTRLPCRKFEAMDHFQKCFAIIKLKKELAAGRVQKDWKAIRVDFVMPPVDCFAFALLGWTGSRQFERDLRRFARHERKMLLDRHALYDKTKKIFLPAKTEEDIFAHLGLDYIPPWQRNA

SEQ ID NO: 467 - protein, 362 aa, Artificial Sequence
  Modified TdT Sequence
MENLYFQGTVSQYACQRRTTMENHNQIFTDAFAILAENAEFNESEGPALAFRRAASLLKSLPHAISSSKDLEGLPCLGDQTKAVIEDIYEYGQCSKVQDVLCDDRYQTIKLFTSVFGVGLKTAEKWYRKGFHSLEEVQADKAIHFTKMQKAGFLYYDDISAAVCKAEADAIGQIVEETVRAIAPDAIVTLTGGFRRGKECGHDVDFLITTPEMGKEQLLPDVINLLEKKGLLLYYDLVESTFDKTRLPCRKFEAMDHFQKCFAIIKLKKELAAGRVQKDWKAIRVDFVMPPIDNFAFALLGWTGSRQFERDLRRFARHERKMLLDRHALYDKTKKIFLPAKTEEDIFAHLGLDYIPPWQRNA

SEQ ID NO: 468 - protein, 362 aa, Artificial Sequence
  Modified TdT Sequence
MENLYFQGTVSQYACQRRTTMENHNQIFTDAFAILAENAEFNESEGPCLAFRRAASLLKSLPHAISSSKDLEGLPCLGDQTKAVIEDIIEYGQCSKVQDVLCDDRYQTIKLFTSVFGVGLKTAEKWYRKGFHSLEEVQADKAIHFTKMQKAGFLYYDDISAAVCRAEADAIGQIVEETVRLIAPDAIVTLTGGFRRGKECGHDVDFLITTPEMGKEQLLPKVINLWEKKGLLLYYDLVESTFDKLRLPCRKFEAMDHFQKCFAIIKLKKELAAGRVQKDWKAIRVDFVMPPVDNFAFALLGWTGSRQFERDLRRFARHERKMLLDRHALYDKTKKIFLPAKTEEDIFAHLGLDYIPPWQRNA

SEQ ID NO: 469 - protein, 362 aa, Artificial Sequence
  Modified TdT Sequence
MENLYFQGTVSQYACQRRTTMENHNQIFTDAFAILAENAEFNESEGPALAFRRAASLLKSLPHAISSSKDLEGLPCLGDQTKAVIEDILEYGQCSKVQDVLCDDRYQTIKLFTSVFGVGLKTAEKWYRKGFHTLEEVQADKAIHFTKMQKAGFLYYDDITAAVCKAEADAIGQIVEETVRLIAPDAIVTLTGGFRRGKEIGHDVDFLITTPEMGKEQLLPRVINLLEKKGLLLYYDLVESTFDKTRLPCRKFEAMDHFQKCFAIIKLKKELAAGRVQKDWKAIRVDFVMPPVDNFAFALLGWTGSRQFERDLRRFARHERKMLLDRHALYDKTKKIFLPAKTEEDIFAHLGLDYIPPWQRNA

SEQ ID NO: 470 - protein, 362 aa, Artificial Sequence
  Modified TdT Sequence
MENLYFQGTVSQYACQRRTTMENHNQIFTDAFAILAENAEFNENEGPCLAFRRAASLLKSLPHAISSSKDLEGLPCLGDQTKAVIEDILEYGQCSKVQDVLCDDRYQTIKLFTSVFGVGLKTAEKWYRKGFHSLEEVQADKAIHFTKMQKAGFLYYDDISAAVCKAEADAIGQIVEETVRLIAPDAIVTLTGGFRRGKEIGHDVDFLITTPEMGKEQLLPRVINLLEKKGLLLYYDLVESTFDKTRLPCRKFEAMDHFQKCFAIIKLKKELAAGRVQKDWKAIRVDFVMPPVDNFAFALLGWTGSRQFERDLRRFARHERKMLLDRHALYDRTKKIFLPAKTEEDIFAHLGLDYVPPWQRNA

SEQ ID NO: 471 - protein, 362 aa, Artificial Sequence
  Modified TdT Sequence
MENLYFQGTVSQYACQRRTTMENHNQIFTDAFAILAENAEFNENEGPCLAFRRAASLLKSLPHAISSSKDLEGLPCLGDQTKAVIEDILEYGQCSKVQDVLCDDRYQTIKLFTSVFGVGLKTAEKWYRKGFHSLEEVQADKAIHFTKMQRAGFLYYDDISAAVCKAEADAIGQIVEETVRLIAPDAIVTLTGGFRRGKECGHDVDFLITTPEMGKEQLLPKVIRLWEKKGLLLYYDLVESTFDKTRLPCRKFEAMDHFQKCFAIIKLKKELAAGRVQKDWKAIRVDFVMPPVDNFAFALLGWTGSRQFERDLRRFARHERKMLLDRHALYDKTKKIFLPAKTEEDIFAHLGLDYIPPWQRNA

SEQ ID NO: 472 - protein, 362 aa, Artificial Sequence
  Modified TdT Sequence
MENLYFQGTVSQYACQRRTTMENHNQVFTDAFAILAENAEFNESEGPALAFRRAASLLKSLPHAISSSKDLEGLPCLGDQTKAVIEDILEYGQCSKVQDVLCDDRYQTIKLFTSVFGVGLKTAEKWYRKGFHSLEEVQADKAIQFTKMQKAGFLYYDDISAAVCKAEADAIGQIVEETVRLIAPDAIVTLTGGFRRGKEIGHDVDFLITTPEMGKEQLLPKVINLLEKKGLLLYYDLVESTFDKTRLPCRKFEAMDHFQKCFAIIKLKKERADGRVQKDWKAIRVDFVMPPVDNFAFALLGWTGSRQFERDLRRFARHERKMLLDRHALYDKTKKIFLPAKTEEDIFAHLGLDYIPPWQRNA

SEQ ID NO: 473 - protein, 362 aa, Artificial Sequence
  Modified TdT Sequence
MENLYFQGTVSQYACQRRTTMENHNQLFTDAFAILAENAEFNESEGPALAFRRAASLLKSLPHAISSSKDLEGLPCLGDQTKAVIEDILEYGQCSKVQDVLCDDRYQTIKLFTSVFGVGLKTAEKWYRKGFHSLEEVQADKAIQFTKMQKAGFLYYDDISAAVCKAEADAIGQIVEETVRKIAPDAIVTLTGGFRRGKECGHDVDFLITTPEMGKEQLLPDVINLLEKKGLLLYYDLVESTFDKTRLPCRKFEAMDHFQKCFAIIKLNKELAAGRVQKDWKAIRVDFVMPPIDNFAFALLGWTGSRQFERDLRRFARHERKMLLDRHALYDKTKKIFLPAKTEEDIFAHLGLDYIPPWQRNA

SEQ ID NO: 474 - protein, 362 aa, Artificial Sequence
  Modified TdT Sequence
MENLYFQGTVSQYACQRRTTMENHNQIFTDAFAILAENAEFNESEGPCLAFRRAASLLKSLPHAISSSKDLEGLPCLGDQTKAVIEDILEYGQCSKVQDVLCDDRYQTIKLFTSVFGVGLKTAEKWYRKGFHSLEEVQADKAIHFTKMQKAGFLYYDDISAAVCRAEADAIGQIVEETVRLIAPDAIVTLTGGFRRGKECGHDVDFLITTPEMGKEQLLPKVINLWEKKGLLLYYDLVESTFDKTRLPCRKFEAMDHFQKCFAIIKLKKELADGRVQKDWKAIRVDFVMPPVDRFAFALLGWTGSRQFERDLRRFARHERKMLLDRHALYDKTKKIFLPAKTEEDIFAHLGLDYIPPWQRNA

SEQ ID NO: 475 - protein, 362 aa, Artificial Sequence
  Modified TdT Sequence
MENLYFQGTVSQYACQRRTTMENHNQIFTDAFAILAENAEFNESEVPALAFRRAASLLKSLPHAISSSKDLEGLPCLGDQTKAVIEDILEYGQCSKVQDVLCDDRYQTIKLFTSVFGVGLKTAEKWYRKGFHSLEEVQADKAIQFTKMQKAGFLYYDDISAAVCKAEADAIGQIVEETVRLIAPDAIVTLTGGFRRGKECGHDVDFLITTPEMGKEQLLPKVINLLEKKGLLLYYDLVESTFDKARLPCRKFEAMDHFQKCFAIIKLKKELAAGRVQKDWKAIRVDFVMPPVDNFAFALLGWTGSRQFERDLRRFARHERKMLLDRHALYDKTKKIFLPAKTEEDIFAHLGLDYIPPWQRNA

SEQ ID NO: 476 - protein, 362 aa, Artificial Sequence
  Modified TdT Sequence
MENLYFQGTVSQYACQRRTTLENHNQIFTDAFAILAENAEFNESEGPALAFRRAASLLKSLPHAISSSKDLEGLPCLGEQTKAVIEDILEYGQCSKVQDVLCDDRYQTIKLFTSVFGVGLKTAEKWYRKGFHSLEEVQADKAIQFTKMQKAGFLYYDDISAAVCKAEADAIGQIVEETVRLIAPDAIVTLTGGFRRGKECGHDVDFLITTPEMGKEQLLPKVINLLEKKGLLLYYDLVESTFDKTRLPCRKFEAMDHFQKCFAIIKLKKELAAGRVQKDWKAIRVDFVMPPIDNFAFALLGWTGSRQFERDLRRFARHERKMLLDRHALYDKTKKIFLPAKTEEDIFAHLGLDYIPPWQRNA

SEQ ID NO: 477 - protein, 362 aa, Artificial Sequence
  Modified TdT Sequence
MENLYFQGTVSQYACQRRTTMENHNQIFTDAFAILAENAEFNESEGPALAFRRAASLLKSLPHAISSSKDLEGLPCLGDQTKGVIEDILEYGQCSKVQDVLCDDRYQTIKLFTSVFGVGLKTAEKWYRKGFHSLEEVQADKAIQFTKMQKAGFLYYDDISAAVCKAEADAIGQIVEETVRLIAPDAIVTLTGGFRRGKECGHDVDFLITTPEMGKEQLLPDLINLLEKKGLLLYYDLVESTFDKTRLPCRRFEAMDHFQKCFAIIKLKKELAAGRVQKDWKAIRVDFVMPPIDNFAFALLGWTGSRQFERDLRRFARHERKMLLDRHALYDKTKKIFLPAKTEEDIFAHLGLDYIPPWQRNA

SEQ ID NO: 478 - protein, 362 aa, Artificial Sequence
  Modified TdT Sequence
MENLYFQGTVSQYACQRRTTMENHNQIFTDAFAILAENAEFNESEGPALAFRRAASLLKSLPHAISSSKDLEGLPCLGDQTKAVIEDILEYGQCSKVQEVLCDDRYQTIKLFTSVFGVGLKTAEKWYRKGFHSLEEVQADKAIHFTKMQKAGFLYYDDISAAVCKAEADAIGQIVEETVRLIAPDALVTLTGGFRRGKECGHDVDFLITTPEMGKEQLLPDVINLLEKKGLLLYYDLVESTFDKTRLPCRKFEAMDHFQKCFAIIKLKKELAAGRVQKDWKAIRVDFVMPPIDNFAFALLGWTGSRQFERDLRRFARHERKMLLDRHALYDKTKKIFLPAKTEEDIFAHLGLDYIPPWQRNA

SEQ ID NO: 479 - protein, 362 aa, Artificial Sequence
  Modified TdT Sequence
MENLYFQGTVSQYACQRRTTMENHNQIFTDAFAILAENAEFNESEGPALAFRRAASLLKSLPHAISSSKDLEGLPCLGDQTKAVIEDILEYGQCSKVQEVLCDDRYQTIKLFTSVFGVGLKTAEKWYRKGFHSLEEVQADKAIQFTKMQKAGFLYYDDISAAVCKAEADAIGQIVEETVRLMAPDAIVTLTGGFRRGKECGHDVDFLITTPEMGKEQLLPDVINLLEKKGLLLYYDLVESTFDKTRLPCRKFEAMDHFQKCFAIIKLEKELAAGRVQKDWKAIRVDFVMPPIDNFAFALLGWTGSRQFERDLRRFARHERKMLLDRHALYDKTKKIFLPAKTEEDIFAHLGLDYIPPWQRNA

SEQ ID NO: 480 - protein, 362 aa, Artificial Sequence
  Modified TdT Sequence
MENLYFQGTVSQYACQRRTTMENHNQIFTDAFAILAENAEFNESEGPALAFRRAASLLKSLPHTISSSKDLEGLPCLGDQTKAVIEDILEYGQCSKVQDVLCDDRYQTIKLFTSVFGVGLKTAEKWYRKGFHSLEEVQADKAIQFTKMQKAGFLYYDDISAAVCKAEADAIGQIVEETVRLIAPDAIVTLTGGFRRGKSCGHDVDFLITTPEMGKEQLLPDVINLLEKKGLLLYYDLVESTFDKTRLPCRKFEAMDHFQKCFAIIKLKKELAAGRVQKDWKAIRVDFVMPPIDNFAFTLLGWTGSRQFERDLRRFARHERKMLLDRHALYDKTKKIFLPAKTEEDIFAHLGLDYIPPWQRNA

SEQ ID NO: 481 - protein, 362 aa, Artificial Sequence
  Modified TdT Sequence
MENLYFQGTVSQYACQRRTTMENHNQIFTDAFAILAENAEFNESEGPCLAFRRAASLLKSLPHAISSSKDLEGLPCLGDQTKAVIEDILEYGQCSKVQDVLCDDRYQTIKLFTSVFGVGLKTAEKWYRKGFHSLEEVQADKAIQFTKMQKAGFLYYDDISAAVCKAEADAIGQVVEETVRLIAPDAIVTLTGGFRRGKEIGHDVDFLITTPEMGKEQLLPRVINLLEKKGLLLYYDLVESTFDKTRLPCRKFEAMDHFQKCFAIIKLKKELADGRVQKDWKAIRVDFVMPPVDNFAFALLGWTGSRQFERDLRRFARHERKMLLDRHALYDKTKKIFLPAKTEEDIFAHLGLDYIPPWQRNA

SEQ ID NO: 482 - protein, 362 aa, Artificial Sequence
  Modified TdT Sequence
MENLYFQGTVSQYACQRRTTMENHNQIFTDAFAILAENAEFNESEGPCLAFRRAASLLKSLPHAISSSKDLEGLPCLGDQTKAVIEDILECGQCSKVQDVLCDDRYQTIKLFTSVFGVGLKTAEKWYRKGFHSLEEVQADKAIHFTKMQKAGFLYYDDISAAVCKAEADAIGQIVEETVRLIAPDAIVTLTGGFRRGKECGHDVDFLITTPEMGKEQLLPKVINLWEQKGLLLYYDLVESTFDKTRLPCRKFEAMDHFQKCFAIIKLKKELAAGRVQKDWKAIRVDFVMPPVDCFAFALLGWTGSRQFERDLRRFARHERKMLLDRHALYDKTKKIFLPAKTEEDIFAHLGLDYIPPWQRNA

SEQ ID NO: 483 - protein, 362 aa, Artificial Sequence
  Modified TdT Sequence
MENLYFQGTVSQYACQRRTTMENHNQIFTDAFAILAENAEFNESEGPCVAFRRAASLLKSLPHAISSSKDLEGLPCLGDQTKAVIEDILEYGQCSKVQDVLCDDRYQTIKLFTSVFGVGLKTAEKWYRKGFHSFEEVQADKAIHFTKMQKAGFLYYDDISAAVCKAEADAIGQIVEETVRLIAPDAIVTLTGGFRRGKECGHDVDFLITTPEMGKEQLLPKVINLWEKKGLLLYYDLVESTFDKTRLPCRKFEAMDHFQKCFAIIKLKKELADGRVQKDWKAIRVDFVMPPVDNFAFALLGWTGSRQFERDLRRFARHERKMLLDRHALYDKTKKIFLPAKTEEDIFAHLGLDYIPPWQRNA

SEQ ID NO: 484 - protein, 362 aa, Artificial Sequence
  Modified TdT Sequence
MENLYFQGTVSQYACQRRTTMENHNQIFTDAFAILAENAEFNESEGPCLAFRRAASLLKSLPHAISSSKDLEGLPCLGDQTKAVIEDILEYGQCSKVQDVLCDDRYQTIKLFTSVFGVGLKTAEKWYRKGFHSLEEVQADKAIQFTKMQKAGFLYYDDISAAVCKAEADAIGQIVEETVRLIAPDAIVTLTGGFRRGKNCGHDVDFLITTPEMGKEQLLPKVINLWEKKGLLLYYDLVESTFDKTRLPCRKFEAMDHFQKCFAIIKLKKELAAGRVQKDWKAIRVDFVMPPVDNYAFALLGWTGSRQFERDLRRFARHERKMLLDRHALYDKTKKIFLPAKTEEDIFAHLGLDYIPPWQRNA

SEQ ID NO: 485 - protein, 362 aa, Artificial Sequence
  Modified TdT Sequence
MENLYFQGTVSQYACQRRTTMENHNQIFTDAFAILAENAEFNESEGPALAFRRAASLLKSLPHAISSSKDLEGLPCLGDQTKAVIEDILEYGQCSKVQDVLCDDRYQTIKLFTSVFGVGLKTAEKWYRKGFHSLEEVQADKAIQFTKMQKAGFLYYDDISAAVCKAEADAIGQIVEETVRLIAPDAIVTLTGGFRRGKECGHDVDFIITTPEMGKEQLLPDVINLLEKKGLLLYYDLVESTFDKTRLPSRKFEAMDHFQKCFAIIKLKKELAAGRVQKDWKAIRVDFVMPPADNFAFALLGWTGSRQFERDLRRFARHERKMLLDRHALYDKTKKIFLPAKTEEDIFAHLGLDYIPPWQRNA

SEQ ID NO: 486 - protein, 362 aa, Artificial Sequence
  Modified TdT Sequence
MENLYFQGTVSQYACQRRTTMENHNQIFTDAFAILAENAEFNESEGPALAFRRAASLLKSLPHAILSSKDLEGLPCLGDQTKAVIEDILEYGQCSKVQDVLCDDRYKTIKLFTSVFGVGLKTAEKWYRKGFHSLEEVQADKAIQFTKMQKAGFLYYDDISAAVCKAEADAIGQIVEETVRLIAPDAIVTLTGGFRRGKECGHDVDFLITTPEMGKEQLLPDVINLLEKKGLLLYYDLVESTFDKTRLPCRKFEAMDHFQKCFAIIKLKKELAAGRVQKDWKAIRVDFVMPPADNFAFALLGWTGSRQFERDLRRFARHERKMLLDRHALYDKTKKIFLPAKTEEDIFAHLGLDYIPPWQRNA

SEQ ID NO: 487 - protein, 362 aa, Artificial Sequence
  Modified TdT Sequence
MENLYFQGTVSQYACQRRTTMENHNQIFTDAFAILAENAEFNESEGPALAFRRAASLLKSLPHAISSSKDLEGLPCLGDQTKAVIEDILEYGQCSKVQDVLCDDRYQTIKLFTSVFGVGLKTAEKWYRMGFHSLEEVQADKAIHFTKMQKAGFLYYDDISAAVCKAEADAIGQIVEETVRLIAPDAIVTLTGGFRRGKEIGHDVDFLITTPEMGKEQLLPKVINLLEKKGLLLYYDLVESTFDKARLPCRKFEAMDHFQKCFAIIKLKKELAAGRVQKDWKAIRVDFVMPPVDNFAFALLGWTGSRQFERDLRRFARHERKMLLDRHALYDKTKKIFLPAKTEEDIFAHLGLDYIPPWQRNA

SEQ ID NO: 488 - protein, 362 aa, Artificial Sequence
  Modified TdT Sequence
MENLYFQGTVSQYACQRRTTMENHNQIFTDAFAILAENAEFNESEGPCLAFRRAASLLKSLPHAISSSKDLEGLPCLGDQTKAVIEDILEYGQCSKVQDVLCDDRYQTIKLFTSVFGVGLKTAEKWYRKGFHSLEEVQADKAIHFTKMQKAGFLYYDDISAAVCKAEADAIGQIVEETVRLIAPDAIVTLTGGFRRGKECGHDVDFLITTPEAGREQLLPKVINLWEKKGLLLYYDLVESTFDKTRLPCRKFEAMDHFQKCFAIIKLKKELAAGRVQKDWKAIRVDFVMPPVDRFAFALLGWTGSRQFERDLRRFARHERKMLLDRHALYDKTKKIFLPAKTEEDIFAHLGLDYIPPWQRNA

SEQ ID NO: 489 - protein, 362 aa, Artificial Sequence
  Modified TdT Sequence
MENLYFQGTVSQYACQRRTTMENHNQIFTDAFAILAENAEFNESEGPALAFRRAASLLKSLPHAISSSKDLEGLPCLGDQTKAVIEEILEYGQCSKVQDVLCDDRYQTIKLFTSVFGVGLKTAEKWYRKGFHSLEEVQADKAIQFTKMQKAGFLYYDDISAAVCKAEADAIGQIVEETVRLIAPDALVTLTGGFRRGKECGHDVDFLITTPEQGKEQLLPDVINLLEKKGLLLYYDLVESTFDKTRLPCRKFEAMDHFQKCFAIIKLKKELAAGRVQKDWKAIRVDFVMPPIDNFAFALLGWTGSRQFERDLRRFARHERKMLLDRHALYDKTKKIFLPAKTEEDIFAHLGLDYIPPWQRNA

SEQ ID NO: 490 - protein, 362 aa, Artificial Sequence
  Modified TdT Sequence
MENLYFQGTVSQYACQRRTTMENHNQVFTDAFAILAENAEFNESEGPCLAFRRAASLLKSLPHAISSSKDLEDLPCLGDQTKAVIEDILEYGQCSKVQDVLCDDRYQTIKLFTSVFGVGLKTAEKWYRKGFHSLEEVQADKAIHFTKMQKAGFLYYDDISAAVCKAEADAIGQIVEETVRLIAPDAIVTLTGGFRRGKEIGHDVDFLITTPEAGKEQLLPRVINLLEKKGLLLYYDLVESTFDKTRLPCRKFEAMDHFQKCFAIIKLKKELAAGRVQKDWKAIRVDFVMPPVDNFAFALLGWTGSRQFERDLRRFARHERKMLLDRHALYDKTKKIFLPAKTEEDIFAHLGLDYIPPWQRNA

SEQ ID NO: 491 - protein, 362 aa, Artificial Sequence
  Modified TdT Sequence
MENLYFQGTVSQYACQRRTTMENHNQIFTDAFAILAENAEFNESEGPCLAFRRAASLLKSLPHAISSSKDLEGLPCLGDQTKAVIEDILEYGQCSKAQDVLCDDRYQTIKLFTSVFGVGLKTAEKWYRKGFHSLEEVQADKAIHFTKMQKAGFLYYDDISAAVCKAEADAIGQIVEETVRLIAPDAIVTLTGGFRRGKNIGHDVDFLITTPEMGKEQLLPKVINLWEKKGLLLYYDLVESTFDKTRLPCRKFEAMDHFQKCFAIIKLKKELAAGRVQKDWKAIRVDFVMPPVDNFAFALLGWTGSRQFERDLRRFARHERKMLLDRHALYDKTKKIFLPAKTEEDIFAHLGLDYIPPWQRNA

SEQ ID NO: 492 - protein, 362 aa, Artificial Sequence
  Modified TdT Sequence
MENLYFQGTVSQYACQRRTTMENHNQIFTDAFAILAENAEFNESEGPALAFRRAASLLKSLPHAISSSKDLEGLPCLGDQTKAVIEDILEYGQCSKVQDVLCDDRYQTIKLFTSVFGVGLKTAEKWYRKGFHSLEEVQADKAIQFTKMQRAGFLYYDDISAAVCKAEADAIGQIVEETVRLIAPDALVTLTGGFRRGKEIGHDVDFLITTPEMGKEQLLPKVINLLEKKGLLLYYDLVESTFDKTRLPCRKFEAMDHFQKCFAIIKLKKELAAGRVQKDWKAIRVDFVMPPVDNFAFALLGWTGSRQFERDLRRFARHERKMLLDRHALYDKTKKIFLPAKTEEDIFAHLGLEYIPPWQRNA

SEQ ID NO: 493 - protein, 362 aa, Artificial Sequence
  Modified TdT Sequence
MENLYFQGTVSQYACQRRTTMENHNQIFTDAFAILAENAEFNESEGPCLAFRRAASLLKSLPHAISSSKDLEGLPCLGDQTKAVIEDILEYGQCSKVQDVLCDDRYQTIKLFTSVFGVGLKTAEKWYRKGFHSLEEVQADKAIHFTKMQKAGFLYYDDISAAVCKAEADAIGQIVEETVRLIAPDAIVTLTGGFRRGKEIGHDVDFLITTPEMGKEQLLPRVINLWEKKGLLLYYDLVESTFDKTRLPCRKFEAMDHFQKCFAIIKLKKELAAGRVQKDWKAIRVDFVMPPVDNFAFALLGWTGSRQFERDLRRFARHERKMLLDRHALYDKTKKIFLPAKSEEEIFAHLGLDYIPPWQRNA

SEQ ID NO: 494 - protein, 362 aa, Artificial Sequence
  Modified TdT Sequence
MENLYFQGTVSQYACQRRTTMENHNQIFTDAFAILAENAEFNESEGPALAFRRAASLLKSLPHAISSSKDLEGLPCLGDQTKAVIEEILEYGQCSKVQDVLCDDRYQTIKLFTSVFGVGLKTAEKWYRKGFHSLEEVQADKAIQFTKMQKAGFLYYDDISAAVCKAEADAIGQIVEETVRLIAPDAIVTLTGGFRRGKECGHDVDFLITTPEMGKEQLLPDVINLLEKKGLLLYYDLVESTFDKTRLPCRKFEAMDHFQKCFAIIKLNKELAAGRVQKDWKAIRVDFVMPPADNFAFALLGWTGSRQFERDLRRFARHERKMLLDRHALYDKTKKIFLPAKTEEDIFAHLGLDYIPPWQRNA

SEQ ID NO: 495 - protein, 362 aa, Artificial Sequence
  Modified TdT Sequence
MENLYFQGTVSQYACQRRTTMENHNQIFTDAFAILAENAEFNESEGPALAFRRAASLLKSLPHAISSSKDLEGLPCLGDQTKAVIEDILEYGQCSKVQDVLCDDRYQTIKLFTSVFGVGLKTAEKWYRKGFHSLEEVQADKAIQFTKMQKAGFLYYDDISAAVCKAEADAIGQIVEETVRLIAPDAIVTLTGGFRRGKECGHDVDFLITTPEQGKEQLLPDVINLLEKKGLLLYYDLVESTFDKTRLPSRKFEAMDHFQKCFAIIKLKKELAAGCVQKDWKAIRVDFVMPPIDNFAFALLGWTGSRQFERDLRRFARHERKMLLDRHALYDKTKKIFLPAKTEEDIFAHLGLDYIPPWQRNA

SEQ ID NO: 496 - protein, 362 aa, Artificial Sequence
  Modified TdT Sequence
MENLYFQGTVSQYACQRRTTMENHNQIFTDAFAILAENAEFNESEGPCLAFRRAASLLKSLPHAISSSKDLEGLPCLGDQTKAVIEDILECGQCSKVQDVLCDDRYQTIKLFTSVFGVGLKTAEKWYRKGFHSLEEVQADKAIHFTKMQKAGFLYYDDISAAVCKAEADAIGQIVEETVRLIAPDAIVTLTGGFRRGKECGHDVDFLITTPEMGKEQLLPKVINLWEKKGLLLYYDLVESTFDKTRLPCRKFEAMDHFQKCFAIIKLKAELAAGRVQKDWKAIRVDFVMPPVDNFAFALLGWTGSRQFERDLRRFARHERRMLLDRHALYDKTKKIFLPAKTEEDIFAHLGLDYIPPWQRNA

SEQ ID NO: 497 - protein, 362 aa, Artificial Sequence
  Modified TdT Sequence
MENLYFQGTVSQYACQRRTTMENHNQIFTDAFAILAENAEFNESEGPALAFRRAASLLKSLPHAISSSKDLEGLPCLGDQTKGVIEDILEYGQCSKVQDVLCDDRYQTIKLFTSVFGVGLKTAEKWYRMGFHSLEEVQADKAIQFTKMQRAGFLYYDDISAAVCKAEADAIGQIVEETVRLIAPDAIVTLTGGFRRGKEIGHDVDFLITTPEMGKEQLLPKVINLLEKKGLLLYYDLVESTFDKTRLPCRKFEAMDHFQKCFAIIKLKKELAAGRVQKDWKAIRVDFVMPPVDNFAFALLGWTGSRQFERDLRRFARHERKMLLDRHALYDKTKKIFLPAKTEEDIFAHLGLDYIPPWQRNA

SEQ ID NO: 498 - protein, 362 aa, Artificial Sequence
  Modified TdT Sequence
MENLYFQGTVSQYACQRRTTMENHNQIFTDAFAILAENAEFNESEGPCVAFRRAASLLKSLPHAISSSKDLEGLPCLGDQTKAVIEDILEYGQCSKVQDVLCDDRYQTIKLFTSVFGVGLKTAEKWYRKGFHSLEEVQADKAIHFTKMQKAGFLYYDDISAAVCKAEADAIGQIVEETVRLIAPDAIVTLTGGFRRGKEIGHDVDFLITTPEMGKEQLLPRVINLLEKKGLLLYYDLVESTFDKTRLPCRKFEAMDHFQKCFAIIKLKKELAAGRVQKDWKAIRVDFVLPPVDNFAFALLGWTGSRQFERDLRRFARHERKMLLDRHALYDKTKKIFLPAKTEEDIFAHLGLDYIDPWQRNA

SEQ ID NO: 499 - protein, 362 aa, Artificial Sequence
  Modified TdT Sequence
MENLYFQGTVSQYACQRRTTMENHNQIFTDAFAILAENAEFNESEGPALAFRRAASLLKSLPHAISSSKDLEGLPCLGDQTKAVIEDILEYGQCSKVQDVLCDDRYQTIKLFTSVFGVGLKTAEKWYRKGFHSLEEVQADKAIQFTKMQKAGFLYYDDISAAVCKAEADAIGQIVEETVRLIAPDAIVTLTGGFRRGKEIGHDVDFLITTPEAGKEQLLPKVINLLEKKGLLLYYDLVESTFDIARLPCRKFEAMDHFQKCFAIIKLKKELAAGRVQKDWKAIRVDFVMPPVDNFAFALLGWTGSRQFERDLRRFARHERKMLLDRHALYDKTKKIFLPAKTEEDIFAHLGLDYIPPWQRNA

SEQ ID NO: 500 - protein, 362 aa, Artificial Sequence
  Modified TdT Sequence
MENLYFQGTVSQYACQRRTTMENHNQIFTDAFAILAENAEFNESEGPALAFRRAASLLKSLPHAISSSKDLEGLPCLGDQTKAVIEDILEYGQCSKVQDVLCDDRYKTIKLFTSVFGVGLKTAEKWYRKGFHSLEEVQADRAIQFTKMQKAGFLYYDDISAAVCKAEADAIGQIVEETVRLIAPDAIVTLTGGFRRGKECGHDVDFLITTPEMGKEQLLPKVINLLEKKGLLLYYDLVESTFDKTRLPCRKFEAMDHFQKCFAIIKLKKELAAGRVQKDWKAIRVDFVMPPIDNFAFALLGWTGSRQFERDLRRFARHERKMLLDRHALYDKTKKIFLPAKTEEDIFAHLGLDYIPPWQRNA

SEQ ID NO: 501 - protein, 362 aa, Artificial Sequence
  Modified TdT Sequence
MENLYFQGTVSQYACQRRTTMENHNQVFTDAFAILAENAEFNESEGPALAFLRAASLLKSLPHAISSSKDLEGLPCLGDQTKAVIEDILEYGQCSKVQDVLCDDRYQTIKLFTSVFGVGLKTAEKWYRKGFHSLEEVQADKAIHFTKMQKAGFLYYDDISAAVCKAEADAIGQIVEETVRLIAPDAIVTLTGGFRRGKEIGHDVDFLITTPEMGKEQLLPRVINLLEKKGLLLYYDLVESTFDKTRLPCRKFEAMDHFQKCFAIIKLKKELAAGRVQKDWKAIRVDFVMPPVDNFAFALLGWTGSRQFERDLRRFARHERKMLLDRHALYDKTKKIFLPAKTEEDIFAHLGLDYIPPWQRNA

SEQ ID NO: 502 - protein, 362 aa, Artificial Sequence
  Modified TdT Sequence
MENLYFQGTVSQYACQRRTTMENHNQIFTDAFAILAENAEFNESEGPCLAFRRAASLLKSLPHAISSSKDLEGLPCLGDQTKAVIEDILEYGQCSKVQDVLCDDRYQTIKLFTSVFGVGLKTAEKWYRKGFHSLEEVQADKAIHFTKMQKAGFLYYDDISAAVCKAEADAIGQIVEETVRLIAPDAIVTLTGGFRRGKEIGHDVDFLITTPEMGKEQLLPRVIDLLEKKGLLLYYDLVESTFDKTRLPCRKFEAMDHFQKCFAIIKLKKELAAGRVQKDWKAIRVDFVLPPVDNFAFALLGWTGSRQFERDLRRFARHERKMLLDRHALYDKTKKIFLPAKTEEDIFAHLGLDYVPPWQRNA

SEQ ID NO: 503 - protein, 362 aa, Artificial Sequence
  Modified TdT Sequence
MENLYFQGTVSQYACQRRTTMENHNQIFTDAFAILAENAEFNESEGPALAFRRAASLLKSLPHAISSSKDLEGLPCLGDQTKAVIEDILEYGQCSKVQDVLCDDRYQTIKLFTSVFGVGLKTAEKWYRKGFHSLEEVQADKAIQFTKMQKAGFLYYDDISAAVCKAEADAIGQIVEETVRLIAPDAIVTLTGGFRRGKEIGHDVDFLITTPEQGKEQLLPKLINLLEKKGLLLYYDLVESTFDKTRLPCRKFEAMDHFQKCFAIIKLKKEQAAGRVQKDWKAIRVDFVMPPVDNFAFALLGWTGSRQFERDLRRFARHERKMLLDRHALYDKTKKIFLPAKTEEDIFAHLGLDYIPPWQRNA

SEQ ID NO: 504 - protein, 362 aa, Artificial Sequence
  Modified TdT Sequence
MENLYFQGTVSQYACQRRTTMENHNQIFTDAFAILAENAEFNESEGPCLAFRRAASLLKSLPHAISSSKDLEGLPCLGDQTKAVIEDILEYGQCSKVQDVLCDDRYQTIKLFTSVFGVGLKTAEKWYRKGFHSLEEVQADKAIHFTKMQKAGFLYYDDISAAVCKAEADAIGQIVEETVHLIAPDAIVALTGGFRRGKEIGHDVDFLITTPEMGKEQLLPRVINLLEKKGLLLYYDLVESTFDKTRLPCRKFEAMDHFQKCFAIIKLKKELAAGRVQKDWKAIRVDFVMPPVDNFAFALLGWTGSRQFERDLRRFARHERKMLLDRHALYDKTKRIFLPAKTEEDIFAHLGLDYIPPWQRNA

SEQ ID NO: 505 - protein, 362 aa, Artificial Sequence
  Modified TdT Sequence
MENLYFQGTVSQYACQRRTTMENHNQVFTDAFAILAENAEFRESEGPALAFRRAASLLKSLPHAISSSKDLEGLPCLGDQTKAVIEDILEYGQCSKVQDVLCDDRYQTIKLFTSVFGVGLKTAEKWYRKGFHSLEEVQADKAIQFTKMQKAGFLYYDDISAAVCKAEADAIGQIVEETVRLIAPDAIVTLTGGFRRGKEIGHDVDFLITTPEMGKEQLLPKVINLLEQKGLLLYYDLVESTFDKTRLPCRKFEAMDHFQKCFAIIKLKKELAAGRVQKDWKAIRVDFVMPPVDNFAFALLGWTGSRQFERDLRRFARHERKMLLDRHALYDKTKKIFLPAKTEEEIFAHLGLDYIPPWQRNA

SEQ ID NO: 506 - protein, 362 aa, Artificial Sequence; identical to SEQ ID NO: 391
  Modified TdT Sequence

SEQ ID NO: 507 - protein, 362 aa, Artificial Sequence
  Modified TdT Sequence
MENLYFQGTVSQYACQRRTTMENHNQIFTDAFAILAENAEFNESEGPALAFRRAASLLKSLPHAISSSKDLEGLPCLGDQTKAVIEDILEYGQCSKVQDVLCDDRYQTIKLFTSVFGVGLKTAEKWYRMGFHSLEEVQADRAIQFTKMQKAGFLYYDDISAAVCKAEADAIGQIVEETVRLIAPDAIVTLTGGFRRGKEIGHDVDFLITTPEAGKEQLLPKVINLLEQKGLLLYYDLVESTFDKTRLPCRKFEAMDHFQKCFAIIKLKKELAAGRVQKDWKAIRVDFVMPPVDNFAFALLGWTGSRQFERDLRRFARHERKMLLDRHALYDKTKKIFLPAKTEEDIFAHLGLDYIPPWQRNA

SEQ ID NO: 508 - protein, 362 aa, Artificial Sequence
  Modified TdT Sequence
MENLYFQGTVSQYACQRRTTMENHNQIFTDAFAILAENAEFNESESPCLAFRRAASLLKSLPHAISSSKDLEGLPCLGDQTKAVIEDILEYGQCSKVQDVLCDDRYQTIKLFTSVFGVGLKTAEKWYRKGFHSLEEVQADKAIHFTKMQKAGFLYYDDISAAVCKAEADAIGQIVEETVRLIAPDAIVTLTGGFRRGKEIGHDVDFLITTPEMGKEQLLPRVINLLEQKGLLLYYDLVESTFDKTRLPCRKFEAMDHFQKCFAIIKLKKELAAGRVQKDWKAIRVDFVMPPVDNFAFALLGWTGSRQFERDLRRFARHERKMLLDRHALYDKTKKIFLPAKTEEDIFAHLGLDYIDPWQRNA

SEQ ID NO: 509 - protein, 362 aa, Artificial Sequence
  Modified TdT Sequence
MENLYFQGTVSQYACQRRTTMENHNQVFTDAFAILAENAEFNESEGPALAFRRAASLLKSLPHAISSSKDLEGLPCLGDQTKAVIEDILEYGQCSKVQDVLCDDRYQTIKLFTSVFGVGLKTAEKWYRMGFHSLEEVQADKAIQFTKMQKAGFLYYDDISAAVCKAEADAIGQIVEETVRLIAPDAIVTLTGGFRRGKEIGHDVDFLITTPEMGKEQLLPKVINLLEKKGLLLYYDLIESTFDKTRLPCRKFEAMDHFQKCFAIIKLKKELAAGRVQKDWKAIRVDFVMPPVDNFAFALLGWTGSRQFERDLRRFARHERKMLLDRHALYDKTKKIFLPAKTEEDIFAHLGLDYIPPWQRNA

SEQ ID NO: 510 - protein, 362 aa, Artificial Sequence
  Modified TdT Sequence
MENLYFQGTVSQYACQRRTTMENHNQIFTDAFAILAENAEFNESEGPALAFRRAASLLKSLPHAISSSKDLEGLPCLGDQTKAVIEDILEYGQCSKVQDVLCDDRYKTIKLFTSVFGVGLKTAEKWYRKGFHSLEEVQADKAIQFTKMQKAGFLYYDDISAAVCKAEADAIGQIVEETVRLIAPDAIVTLTGGFRRGKECGHDVDFLITTPEMGKEQLLPDVINLLEKKGLLLYYDLVESTFDKTRLPCRKFEAMDHFQKCFAIIKLEKERAAGRVQKDWKAIRVDFVMPPIDNFAFALLGWTGSRQFERDLRRFARHERKMLLDRHALYDKTKKIFLPAKTEEDIFAHLGLDYIPPWQRNA

SEQ ID NO: 511 - protein, 362 aa, Artificial Sequence
  Modified TdT Sequence
MENLYFQGTVSQYACQRRTTMENHNQIFTDAFAILAENAEFNESEGPCLAFRRAASLLKSLPHAISSSKDLEGLPCLGDQTKAVIEDILEYGQCSKVQDVLCDDRYQTIKLFTSVFGVGLKTAEKWYRMGFHSLEEVQADKAIHFTKMQKAGFLYYDDISAAVCKAEADAIGQIVEETVRLIAPDAIVTLTGGFRRGKEIGHDVDFLITTPEMGKEQLLPRVINLWEQKGLLLYYDLVESTFDKTRLPCRKFEAMDHFQKCFAIIKLKKELAAGRVQKDWKAIRVDFVMPPIDNFAFALLGWTGSRQFERDLRRFARHERKMLLDRHALYDKTKKIFLPAKTEEDIFAHLGLDYIPPWQRNA

SEQ ID NO: 512 - protein, 362 aa, Artificial Sequence
  Modified TdT Sequence
MENLYFQGTVSQYACQRRTTMENHNQIFTDAFAILAENAEFNESEGPCLAFRRAASLLKSLPHAIISSKDLEGLPCLGDQTKAVMEDILEYGQCSKVQDVLCDDRYQTIKLFTSVFGVGLKTAEKWYRKGFHSLEEVQADKAIQFTKMQKAGFLYYDDISAAVCKAEADAIGQIVEETVRLIAPDAIVTLTGGFRRGKECGHDVDFLITTPEMGKEQLLPKVINLWEKKGLLLYYDLVESTFDKTRLPCRKFEAMDHFQKCFAIIKLKKELAAGRVQKDWKAIRVDFVMPPVDNFAFALLGWTGSRQFERDLRRFARHERKMLLDRHALYDKTKKIFLPAKTEEDIFAHLGLDYIPPWQRNA

SEQ ID NO: 513 - protein, 362 aa, Artificial Sequence
  Modified TdT Sequence
MENLYFQGTVSQYACQRRTTMENHNQIFTDAFAILAENAEFNESEGPCLAFRRAASLLKSLPHAISSSKDLEGLPCLGDQTKAVIEDILEYGQCSKVQDVLCDDRYQTIKLFTSVFGVGLKTAEKWYRKGFHSLEEVQADNAIHFTKMQKAGFLYYDDISAAVCKAEADAIGQIVEETVRLIAPDAIVTLTGGFRRGKECGHDVDFLITTPEMGREQLLPKVINLWEKKGLLLYYDLVESTFDKLRLPCRKFEAMDHFQKCFAIIKLKKELAAGRVQKDWKAIRVDFVMPPVDNFAFALLGWTGSRQFERDLRRFARHERKMLLDRHALYDKTKKIFLPAKTEEDIFAHLGLDYIPPWQRNA

SEQ ID NO: 514 - protein, 362 aa, Artificial Sequence
  Modified TdT Sequence
MENLYFQGTVSQYACQRRTTMENHNQIFTDAFAILAENAEFNENEGPALAFRRAASLLKSLPHAISSSKDLEGLPCLGDQTKGVIEDILEYGQCSKVQDVLCDDRYKTIKLFTSVFGVGLKTAEKWYRKGFHSLEEVQADKAIQFTKMQKAGFLYYDDISAAVCKAEADAIGQIVEETVRLIAPDAIVTLTGGFRRGKEIGHDVDFLITTPEMGKEQLLPKVINLLEQKGLLLYYDLVESTFDKTRLPCRKFEAMDHFQKCFAIIKLKKELAAGRVQKDWKAIRVDFVMPPVDNFAFALLGWTGSRQFERDLRRFARHERKMLLDRHALYDKTKKIFLPAKTEEDIFAHLGLDYIPPWQRNA

SEQ ID NO: 515 - protein, 362 aa, Artificial Sequence
  Modified TdT Sequence
MENLYFQGTVSQYACQRRTTMENHNQIFTDAFAILAENAEFNESEGPCLAFRRAASLLKSLPHAIISSKDLEGLPCLGDQTKAVIEDILEYGQCSKVQDVLCDDRYQTIKLFTSVFGVGLKTAEKWYRKGFHSLEEVQADKAIHFTKMQKAGFLYYDDISAAVCKAEADAIGQIVEETVRLIAPDAIVTLTGGFRRGKECGHDVDFLITTPGMGKEQLLPKVINLWEKKGLLLYYDLVESTFDKTRLPCRKFEAMDHFQKCFAIIKLKKELAAGRVQKDWKAIRVDFVMPPVDNFAFALLGWTGSRQFERDLRRFARHERKMLLDRHALYDRTKKIFLPAKTEEDIFAHLGLDYIPPWQRNA

SEQ ID NO: 516 - protein, 362 aa, Artificial Sequence
  Modified TdT Sequence
MENLYFQGTVSQYACQRRTTMENHNQIFTDAFAILAENAEFNESEGPCLAFRRAASLLKSLPHAISSSKDLEGLPCLGDQTKAVIEDILEYGQCSKVQDVLCDDRYQTIKLFTSVFGVGLKTAEKWYRKGFHSLEEVQADKAIQFTKMQKAGFLYYDDISAAVCKAEADAIGQIVEETVRLIAPDAIVTLTGGFRRGKECGHDVDFLITTPEMGKEQLLPDVMNLLEKKELLLYYDLVESTFDKTRLPCRKFEAMDHFQKCFAIIKLKKELAAGRVQKDWKAIRVDFVMPPIDNFAFALLGWTGSRQFERDLRRFARHERKMLLDRHALYDKTKKIFLPAKTEEDIFAHLGLEYIPPWQRNA

SEQ ID NO: 517 - protein, 362 aa, Artificial Sequence
  Modified TdT Sequence
MENLYFQGTVSQYACQRRTTMENHNQIFTDAFAILAENAEFNESEGPALAFRRAASLLKSLPHAISSSKDLEGLPCLGDQTKAVIEDILEYGQCSKVQDVLCDDRYQTIKLFTSVFGVGLKTAEKWYRKGFHSLEEVQADKAIQFTKMQKAGFLYYDDISAAVCKAEADAIGQIVEETVRLIAPDAIVTLTGGFRRGKECGHDVDFLITTAEMGKEQLLPDVINLLEKKELLLYYHLVESTFDKTRLPCRKFEAMDHFQKCFAIIKLKKELAAGRVQKDWKAIRVDFVMPPIDNFAFALLGWTGSRQFERDLRRFARHERKMLLDRHALYDKTKKIFLPAKTEEDIFAHLGLDYIPPWQRNA

SEQ ID NO: 518 - protein, 362 aa, Artificial Sequence
  Modified TdT Sequence
MENLYFQGTVSQYACQRRTTMENNNQIFTDAFAILAENAEFNESEGPCLAFRRAASLLKSLPHAISSSKDLEGLPCLGDQTKAVIEDILEYGQCSKVQDVLCDDRYQTIKLFTSVFGVGLKTAEKWYRKGFHTLEEVQADKAIHFTKMQKAGFLYYDDISAAVCKAEADAIGQVVEETVRLIAPDAIVTLTGGFRRGKEIGHDVDFLITTPEMGKEQLLPRVINLLEKKGLLLYYDLVESTFDKTRLPCRKFEAMDHFQKCFAIIKLKKELAAGRVQKDWKAIRVDFVMPPVDNFAFALLGWTGSRQFERDLRRFARHERKMLLDRHALYDKTKKIFLPAKTEEDIFAHLGLDYIPPWQRNA

SEQ ID NO: 519 - protein, 362 aa, Artificial Sequence
  Modified TdT Sequence
MENLYFQGTVSQYACQRRTTMENHNQIFTDAFAILAENAEFNESEGPALAFRRAASLLKSLPHAISSSKDLEGLPCLGDQTKAVIEDILEYGQCSKVQDVLCDDRYKTIKLFTSVFGVGLKTAEKWYRKGFHSLEEVQADKAIQFTKMQKAGFLYYDDISAAVCKAEADAIGQIVEETVRLIAPDAIVTLTGGFRRGKEIGHDVDFLITTPEMGKEQLLPKVINLLEKKGLLLYYDLVESTFDKTRLPCRKFEAMDHFQKCFAIIKLKKERAAGRVQKDWKAIRVDFVMPPIDNFAFALLGWTGSRQFERDLRRFARHERKMLLDRHALYDKTKKIFLPAKTEEDIFAHLGLDYIPPWQRNA

SEQ ID NO: 520 - protein, 362 aa, Artificial Sequence
  Modified TdT Sequence
MENLYFQGTVSQYACQRRTTMENHNQIFTDAFAILAENAEFNESEGPCLAFLRAASLLKSLPHAISSSKDLEGLPCLGDQTKAVIEDILEYGQCSKVQDVLCDDRYQTIKLFTSVFGVGLKTAEKWYRKGFHSLEEVQADKAIHFTKMQKAGFLYYDDISAAVCKAEADAIGQIVEETVRGIAPDAIVTLTGGFRRGKECGHDVDFLITTPGMGKEQLLPKVINLWEKKGLLLYYDLVESTFDKTRLPCRKFEAMDHFQKCFAIIKLKKELAAGRVQKDWKAIRVDFVMPPVDNFAFALLGWTGSRQFERDLRRFARHERKMLLDRHALYDKTKKIFLPAKTEEDIFAHLGLDYIPPWQRNA

SEQ ID NO: 521 - protein, 362 aa, Artificial Sequence
  Modified TdT Sequence
MENLYFQGTVSQYACQRRTTMENHNQIFTDAFAILAENAEFNESEGPCLAFRRAASLLKSLPHAIISSKDLEGLPCLGDQTKAVIEDIIEYGQCSKVQDVLCDDRYQTIKLFTSVFGVGLKTAEKWYRKGFHSLEEVQADKAIHFTKMQKAGFLYYDDISAAVCKAEADAIGQIVEETVRLIAPDAIVTLTGGFRRGKECGHDVDFLITTPEMGKEQLLPKVINLWEKKGLLLYYDLVESTFDKTRLPCRKFEAMDHFQKCFAIIKLKKQLAAGRVQKDWKAIRVDFVMPPVDNFAFALLGWTGSRQFERDLRRFARHERKMLLDRHALYDKTKKIFLPAKTEEDIFAHLGLDYIPPWQRNA

SEQ ID NO: 522 - protein, 362 aa, Artificial Sequence
  Modified TdT Sequence
MENLYFQGTVSQYACQRRTTMENHNQIFTDAFAILAENAEFNESEGPALAFRRAASLLKSLPHAISSSKDLQGLPCLGDQTKAVIEDILEYGQCSKVQDVLCDDRYQTIKLFTSVFGVGLKTAEKWYRKGFHSLEEVQADKAIHFTKMQKAGFLYYDDISAAVCKAEADAIGQIVEETVRLIAPDAIVTLTGGFRRGKECGHDVDFLITTPGMGKEQLLPKVINLWEKKGLLLYYDLVESTFDKTRLPCRKFEAMDHFQKCFAIIKLKKELAAGRVQKDWKAIRVDFVMPPVDNFAFALLGWTGSRQFERDLRRFARHERKMLLDRHALYDKTKKIFLPAKTEEDIFAHLGLDYIPPWQRNA

SEQ ID NO: 523 - protein, 362 aa, Artificial Sequence
  Modified TdT Sequence
MENLYFQGTVSQYACQRRTTMENHNQIFTDAFAILAENAEFNESEGPCLAFRRAASVLKSLPHAISSSKDLEGLPCLGDQTKAVIEDILEYGQCSKVQDVLCDDRYQTIKLFTSVFGVGLKTAEKWYRKGFHSLEEVQADNAIHFTKMQKAGFLYYDDISAAVCKAEADAIGQIVEETVRLIAPDAIVTLTGGFRRGKNCGHDVDFLITTPEMGKEQLLPKVINLWEKKGLLLYYDLVESTFDKTRLPCRKFEAMDHFQKCFAIIKLKKELAAGRVQKDWKAIRVDFVMPPVDNFAFALLGWTGSRQFERDLRRFARHERKMLLDRHALYDKTKKIFLPAKTEEDIFAHLGLDYIPPWQRNA

SEQ ID NO: 524 - protein, 362 aa, Artificial Sequence
  Modified TdT Sequence
MENLYFQGTVSQYACQRRTTMENHNQIFTDAFAILAENAEFNESEGPALAFRRAASLLKSLPHAISSSKDLEGLPCLGDQTKAVIEDILEYGQCSKVQDVLCDDRYKTIKLFTSVFGVGLKTAEKWYRKGFHSLEEVQADKAIQFTKMQKAGFLYYDDISAAVCKAEADAIGQIVEETVRAIAPDAIVTLTGGFRRGKECGHDVDFLITTPEMGKEQLLPDVINLLEKKGLLLYYDLVESTFDKTRLPSRKFEAMDHFQKCFAIIKLKKELAAGRVQKDWKAIRVDFVMPPIDNFAFALLGWTGSRQFERDLRRFARHERKMLLDRHALYDKTKKIFLPAKTEEDIFAHLGLDYIPPWQRNA

SEQ ID NO: 525 - protein, 362 aa, Artificial Sequence
  Modified TdT Sequence
MENLYFQGTVSQYACQRRTTMENHNQIFTDAFAILAENAEFNESEGPALAFRRAASLLKSLPHTISSSKDLEGLPCLGDQTKAVIEDILEYGQCSKVQEVLCDDRYQTIKLFTSVFGVGLKTAEKWYRKGFHSLEEVQADKAIQFTKMQKAGFLYYDDISAAVCKAEADAIGQIVEETVRLIAPDAIVTLTGGFRRGKECGHDVDFLITTPEMGKEQLLPDVINLLEKKELLLYYDLVESTFDKTRLPCRKFEAMDHFQKCFAIIKLKKERAAGRVQKDWKAIRVDFVMPPIDNFAFALLGWTGSRQFERDLRRFARHERKMLLDRHALYDKTKKIFLPAKTEEDIFAHLGLDYIPPWQRNA

SEQ ID NO: 526 - protein, 362 aa, Artificial Sequence
  Modified TdT Sequence
MENLYFQGTVSQYACQRRTTMENHNQLFTDAFAILAENAEFNESEGPALAFRRAASLLKSLPHAILSSKDLEGLPCLGDQTKAVIEDILEYGQCSKVQDVLCDDRYQTIKLFTSVFGVGLKTAEKWYRKGFHSLEEVQADKAIQFTKMQKAGFLYYDDISAAVCKAEADAIGQIVEETVRLIAPDAIVTLTGGFRRGKECGHDVDFLITTAEMGKEQLLPDVINLLEKKGLLLYYDLVESTFDKTRLPCRKFEAMDHFQKCFAIIKLKKELAAGRVQKDWKAIRVDFVMPPIDNFAFTLLGWTGSRQFERDLRRFARHERKMLLDRHALYDKTKKIFLPAKTEEDIFAHLGLDYIPPWQRNA

SEQ ID NO: 527 - protein, 362 aa, Artificial Sequence
  Modified TdT Sequence
MENLYFQGTVSQYACQRRTTMENHNQIFTDAFAILAENAEFNESEGPAVAFRRAASLLKSLPHAISSSKDLEGLPCLGDQTKAVIEDILEYGQCSKVQDVLCDDRYQTIKLFTSVFGVGLKTAEKWYRMGFHSLEEVQADKAIQFTKMQKAGFLYYDDISAAVCKAEADAIGQIVEETVRLIAPDAIVTLTGGFRRGKECGHDVDFLITTPEMGKEQLLPKVINLLEQKGLLLYYDLVESTFDKTRLPCRKFEAMDHFQKCFAIIKLKKELAAGRVQKDWKAIRVDFVMPPVDNFAFALLGWTGSRQFERDLRRFARHERKMLLDRHALYDKTKKIFLPAKTEEDIFAHLGLDYIPPWQRNA

SEQ ID NO: 528 - protein, 362 aa, Artificial Sequence
  Modified TdT Sequence
MENLYFQGTVSQYACQRRTTMENHNQIFTDAFAILAENAEFNESEGPALAFRRAASLLKSLPHAISSSKDLEGLPCLGDQTKAVIEDILEYGQCSKVQDVLCDDRYKTIKLFTSVFGVGLKTAEKWYRKGFHSLEEVQADKAIQFTKMQKAGFLYYDDISAAVCKAEADAIGQIVEETVRKIAPDAIVTLTGGFRRGKECGHDVDFLITTPEQGKEQLLPDVINLLEKKGLLLYYHLVESTFDKTRLPCRKFEAMDHFQKCFAIIKLKKELAAGRVQKDWKAIRVDFVMPPIDNFAFALLGWTGSRQFERDLRRFARHERKMLLDRHALYDKTKKIFLPAKTEEDIFAHLGLDYIPPWQRNA

SEQ ID NO: 529 - protein, 362 aa, Artificial Sequence
  Modified TdT Sequence
MENLYFQGTVSQYACQRRTTMENHNQIFTDAFAILAENAEFNESEGPALAFRRAASLLKSLPHAISSSKDLEGLPCLGDQTKAVIEDILEYGQCSKVQDVLCDDRYQTIKLFTSVFGVGLKTAEKWYRKGFHSLEEVQADKAIQFTKMQKAGFLYYDDISAAVCKAEADAIGQIVEETVRLIAPDAIVTLTGGFRRGKECGHDVDFLITTPEAGKEQLLPKVINLLEQKGLLLYYDLVESTFDKTRLPCRKFEAMDHFQKCFAIIKLKKELAAGRVQKDWKAIRVDFVMPPIDNFAFALLGWTGSRQFERDLRRFARHERKMLLDRHALYDKTKKIFLPAKTEEDIFAHLGLDYIPPWQRNA

SEQ ID NO: 530 - protein, 362 aa, Artificial Sequence
  Modified TdT Sequence
MENLYFQGTVSQYACQRRTTMENHNQIFTDAFAILAENAEFNESESPCLAFRRAASLLKSLPHAISSSKDLEGLPCLGDQTKAVIEDILEYGQCSKVQDVLCDDRYQTIKLFTSVFGVGLKTAEKWYRKGFHSLEEVQADKAIHFTKMQRAGFLYYDDISAAVCKAEADAIGQVVEETVRLIAPDAIVTLTGGFRRGKEIGHDVDFLITTPEMGKEQLLPRVINLLEKKGLLLYYDLVESTFDKTRLPCRKFEAMDHFQKCFAIIKLKKELAAGRVQKDWKAIRVDFVMPPVDNFAFALLGWTGSRQFERDLRRFARHERKMLLDRHALYDKTKKIFLPAKTEEDIFAHLGLDYIPPWQRNA

SEQ ID NO: 531 - protein, 362 aa, Artificial Sequence
  Modified TdT Sequence
MENLYFQGTVSQYACQRRTTMENRNQIFTDAFAILAENAEFNESEGPALAFRRAASLLKSLPHAISSSKDLEGLPCLGDQTKAVIEEILEYGQCSKVQDVLCDDRYQTIKLFTSVFGVGLKTAEKWYRKGFHSLEEVQADKAIQFTKMQKAGFLYYDDISAAVCKAEADAIGQIVEETVRKIAPDAIVTLTGGFRRGKECGHDVDFLITTPEMGKEQLLPDVINLLEKKELLLYYDLVESTFDKTRLPCRKFEAMDHFQKCFAIIKLKKELAAGRVQKDWKAIRVDFVMPPIDNFAFALLGWTGSRQFERDLRRFARHERKMLLDRHALYDKTKKIFLPAKTEEDIFAHLGLDYIPPWQRNA

SEQ ID NO: 532 - protein, 362 aa, Artificial Sequence
  Modified TdT Sequence
MENLYFQGTVSQYACQRRTTMENHNQIFTDAFAILAENAEFNESEGPALAFRRAASLLKSLPHAISSSKDLEGLPCLGDQTKAVIEDILEYGQCSKVQDVLCDDRYQTIKLFTSVFGVGLKTAEKWYRKGFHSLEEVQADKAIQFTKMQKAGFLYYDDISAAVCKAEADAIGQIVEETVRLIAPDAIVTLTGGFRRGKECGHDVDFLITTPEMGKEQLLPKVINLLEKKGLLLYYDLVESTFDKTRLPCRKFEAMDHFQKCFAIIKLNKERAAGRVQKDWKAIRVDFVMPPIDNFAFALLGWTGSRQFERDLRRFARHERKMLLDRHALYDKTKKIFLPAKTEEDIFAHLGLEYIPPWQRNA

SEQ ID NO: 533 - protein, 362 aa, Artificial Sequence
  Modified TdT Sequence
MENLYFQGTVSQYACQRRTTMENHNQIFTDAFAILAENAEFNESEGPALAFRRAASLLKSLPHAISSSKDLEGLPCLGEQTKAVIEDILEYGQCSKVQDVLCDDRYQTIKLFTSVFGVGLKTAEKWYRKGFHSLEEVQADKAIQFTKMQKAGFLYYDDISAAVCKAEADAIGHIVEETVRLIAPDAIVTLTGGFRRGKECGHDVDFLITTPEMGKEQLLPDVINLLEKKGLLLYYDLVESTFDKTRLPCRKFEAMDHFQKCFAIIKLKKELAAGRVQKDWKAIRVDFVMPPIDNFAFALLGWTGSRQFERDLRRFARHERKMLLDRHALYDKTKRIFLPAKTEEDIFAHLGLDYIPPWQRNA

SEQ ID NO: 534 - protein, 362 aa, Artificial Sequence
  Modified TdT Sequence
MENLYFQGTVSQYACQRRTTMENHNQIFTDAFAILAENAEFNESEGPCLAFRRAASLLKSLPHAISSSKDLEGLPCLGDQTKAVIEDILEYGQCSKVQDVLCDDRYQTIKLFTSVFGVGLKTAEKWYRKGFHSFEEVQADKAIHFTKMQKAGFLYYDDISAAVCRAEADAIGQIVEETVRLIAPDAILTLTGGFRRGKECGHDVDFLITTPEMGKEQLLPKVINLWEKKGLLLYYDLVESTFDKTRLPCRKFEAMDHFQKCFAIIKLKKELAAGRVQKDWKAIRVDFVMPPVDNFAFALLGWTGSRQFERDLRRFARHERKMLLDRHALYDKTKKIFLPAKTEEDIFAHLGLDYIPPWQRNA

SEQ ID NO: 535 - protein, 362 aa, Artificial Sequence
  Modified TdT Sequence
MENLYFQGTVSQYACQRRTTMENHNQIFTDAFAILAENAEFNESEGPALAFRRAASLLKSLPHAISSSKDLEGLPCLGDQTKAVIEDILEYGQCSKVQDVLCDDRYKTIKLFTSVFGVGLKTAEKWYRKGFHSLEEVQADKAIQFTKMQKAGFLYYDDISAAVCKAEADAIGQIVEETVHLMAPDALVTLTGGFRRGKECGHDVDFLITTPEMGKEQLLPDVINLLEKKGLLLYYDLVESTFDKTRLPCRKFEAMDHFQKCFAIIKLKKELAAGRVQKDWKAIRVDFVMPPIDNFAFALLGWTGSRQFERDLRRFARHERKMLLDRHALYDKTKKIFLPAKTEEDIFAHLGLDYIPPWQRNA

SEQ ID NO: 536 - protein, 362 aa, Artificial Sequence
  Modified TdT Sequence
MENLYFQGTVSQYACQRRTTMENHNQIFTDAFAILAENAEFNESEGPCVAFRRAASLLKSLPHAISSSKDLQGLPCLGDQTKAVIEDILEYGQCSKVQDVLCDDRYQTIKLFTSVFGVGLKTAEKWYRKGFHSLEEVQADKAIHFTKMQKAGFLYYDDISAAVCKAEADAIGQIVEETVRLIAPDAIVTLTGGFRRGKECGHDVDFLITTPEMGKEQLLPKVINLWEKKGLLLYYDLVESTFDKTRLPCRKFEAMDHFQKCFAIIKLKKELAAGRVQKDWKAIRVDFVMPPVDNFAFALLGWTGSRQFERDLRRFARHERRMLLDRHALYDKTKKIFLPAKTEEDIFAHLGLDYIPPWQRNA

SEQ ID NO: 537 - protein, 362 aa, Artificial Sequence
  Modified TdT Sequence
MENLYFQGTVSQYACQRRTTMENHNQIFTDAFAILAENAEFNESEGPALAFRRAASLLKSLPHAISSSKDLEGLPCLGDQTKAVIEDILEYGQCSKVQDVLCDDRYQTIKLFTSVFGVGLKTAEKWYRKGFHSLEEVQADKAIHFTKMQKAGFLYYDDISAAVCKAEADAIGQIVEETVRLIAPDAIVTLTGGFRRGKEIGHDVDFLITTPEMGKEQLLPRVINLLEKKGLLLFYDLVESTFDKTRLPCRKFEAMDHFQKCFAIIKLKKELAAGRVQKDWKAIRVDFVMPPVDCFAFALLGWTGSRQFERDLRRFARHERKMLLDRHALYDKTKKIFLPAKTEEDIFAHLGLDYIPPWQRNA

SEQ ID NO: 538 - protein, 362 aa, Artificial Sequence
  Modified TdT Sequence
MENLYFQGTVSQYACQRRTTMENHNQIFTDAFAILAENAEFNESEGPALAFRRAASLLKSLPHAISSSKDLEGLPCLGDQTKAVIEDILEYGQCSKVQDVLCDDRYQTIKLFTSVFGVGLKTAEKWYRKGFHSLEDVQADKAIHFTKMQKAGFLYYDDISAAVCKAEADAIGQIVEETVRLIAPDAIVTLTGGFRRGKECGHDVDFLITTPEMGKEQLLPKVVNLWEKKGLLLYYDLVESTFDKTRLPCRKFEAMDHFQKCFAIIKLKKELAAGRVQKDWKAIRVDFVMPPVDNFAFALLGWTGSRQFERDLRRFARHERKMLLDRHALYDKTKKIFLPAKTEEDIFAHLGLDYIPPWQRNA

SEQ ID NO: 539 - protein, 362 aa, Artificial Sequence
  Modified TdT Sequence
MENLYFQGTVSQYACQRRTTMENHNQIFTDAFAILAENAEFNESEGPCLAFRRAASLLKSLPHAISSSKDLEGLPCLGDQTKAVIEDIFEYGQCSKVQDVLCDDRYKTIKLFTSVFGVGLKTAEKWYRMGFHSLEEVQADKAIHFTKMQKAGFLYYDDISAAVCKAEADAIGQIVEETVRLIAPDAIVTLTGGFRRGKEIGHDVDFLITTPEMGKEQLLPRVINLLEKKGLLLYYDLVESTFDKTRLPCRKFEAMDHFQKCFAIIKLKKELADGRVQKDWKAIRVDFVMPPVDNFAFALLGWTGSRQFERDLRRFARHERKMLLDRHALYDKTKKIFLPAKTEEDIFAHLGLDYIPPWQRNA

SEQ ID NO: 540 - protein, 362 aa, Artificial Sequence
  Modified TdT Sequence
MENLYFQGTVSQYACQRRTTMENHNQIFTDAFAILAENAEFNESEGPCVAFRRAASLLKSLPHAISSSKDLEGLPCLGDQTKAVIEDILEYGQCSKVQDVLCDDRYQTIKLFTSVFGVGLKTAEKWYRKGFHSLEEVQADKAIHFTKMQKAGFLYYDDISAAVCKAEADAIGQIVEETVRLIAPDAIVTLTGGFRRGKEIGHDVDFLITTPEMGKEQLLPRVINLLEKKGLLLYYDLVESTFDKTRLPCRKFEAMDHFQQCFAIIKLKKELAAGRVQKDWKAIRVDFVMPPIDNFAFALLGWTGSRQFERDLRRFARHERKMLLDRHALYDKTKKIFLPAKTEEDIFAHLGLDYIPPWQRNA

SEQ ID NO: 541 - protein, 362 aa, Artificial Sequence
  Modified TdT Sequence
MENLYFQGTVSQYACQRRTTMENHNQIFTDAFAILAENAEFNENEGPCLAFLRAASLLKSLPHAISSSKDLEGLPCLGDQTKAVIEDILEYGQCSKVQDVLCDDRYQTIKLFTSVFGVGLKTAEKWYRKGFHSLEEVQADKAIHFTKMQKAGFLYYDDISAAVCKAEADAIGQIVEETVRLIAPDAIVTLTGGFRRGKEIGHDVDFLITTPEMGREQLLPRVIDLLEKKGLLLYYDLVESTFDKTRLPCRKFEAMDHFQKCFAIIKLKKELAAGRVQKDWKAIRVDFVMPPVDNFAFALLGWTGSRQFERDLRRFARHERKMLLDRHALYDKTKKIFLPAKTEEDIFAHLGLDYIPPWQRNA

SEQ ID NO: 542 - protein, 362 aa, Artificial Sequence
  Modified TdT Sequence
MENLYFQGTVSQYACQRRTTMENNNQIFTDAFAILAENAEFNESEGPCLAFRRAASLLKSLPHAISSSKDLEGLPCLGDQTKAVIEDILEYGQCSKVQDVLCDDRYQTIKLFTSVFGVGLKTAEKWYRKGFHSLEEVQADKAIHFTKMQKAGFLYYDDISAAVCKAEADAIGQIVEETVRLIAPDAIVTLTGGFRRGKEIGHDVDFLITTPEMGKEQLLPRVINLLEKKGLLLYYDLVESTFDKTRLPCRKFEAMDHFQKCFAIIKLKQELAAGRVQKDWKAIRVDFVMPPVDNFAFALLGWTGSRQFERDLRRFARHERKMLLDRHALYDKTKRIFLPAKTEEDIFAHLGLDYIPPWQRNA

SEQ ID NO: 543 - protein, 362 aa, Artificial Sequence
  Modified TdT Sequence
MENLYFQGTVSQYACQRRTTMENHNQIFTDAFAILAENAEFNESEGPALAFRRAASLLKSLPHAISSSKDLEGLPCLGDQTKAVIEEILEYGQCSKVQDVLCDDRYQTIKLFTSVFGVGLKTAEKWYRKGFHSLEEVQADKAIQFTKMQKAGFLYYDDISAAVCKAEADAIGQIVEETVRLIAPDAIVTLTGGFRRGKEIGHDVDFLITTPEMGKEQLLPKVINLLEKKGLLLYYHLVESTFDKTRLPCRKFEAMDHFQKCFAIIKLKKELAAGRVQKDWKAIRVDFVMPPVDNFAFALLGWTGSRQFERDLRRFARHERKMLLDRHALYDKTKKIFLPAKTEEDIFAHLGLEYIPPWQRNA

SEQ ID NO: 544 - protein, 362 aa, Artificial Sequence
  Modified TdT Sequence
MENLYFQGTVSQYACQRRTTMENHNQIFTDAFAILAENAEFNESEGPALAFRRAASLLKSLPHAISSSKDLEGLPCLGDQTKAVIEEILEYGQCSKVQDVLCDDRYQTIKLFTSVFGVGLKTAEKWYRKGFHSLEEVQADKSIQFTKMQKAGFLYYDDISAAVCKAEADAIGQIVEETVRLIAPDAIVTLTGGFRRAKECGHDVDFLITTPEMGKEQLLPDVINLLEKKGLLLYYDLVESTFDKTRLPCRKFEAMDHFQKCFAIIKLKKELAAGRVQKDWKAIRVDFVMPPIDNFAFALLGWTGSRQFERDLRRFARHERKMLLDRHALYDKTKKIFLPAKTEEDIFAHLGLDYIPPWQRNA

SEQ ID NO: 545 - protein, 362 aa, Artificial Sequence
  Modified TdT Sequence
MENLYFQGTVSQYACQRRTTMENHNQIFTDAFAILAENAEFNESEGPCLAFRRAASLLKSLPHAISSSKDLEGLPCLGDQTKAVIEDILEYGQCSKVQDVLCDDRYQTIKLFTSVFGVGLKTAEKWYRKGFHSLEEVQADKAIHFTKMQRAGFLYYDDISAAVCKAEADAIGQIVEETVRLIAPDAIVTLTGGFRRGKECGHDVDFLITTPEMGKEQLLPRVINLLEQKGLLLYYDLVESTFDKTRLPCRKFEAMDHFQKCFAIIKLKKELAAGRVQKDWKAIRVDFVMPPVDNFAFALLGWTGSRQFERDLRRFARHERKMLLDRHALYDKTKKIFLPAKTEEDIFAHLGLDYIPPWQRNA

SEQ ID NO: 546 - protein, 362 aa, Artificial Sequence
  Modified TdT Sequence
MENLYFQGTVSQYACQRRTTMENHNQIFTDAFAILAENAEFNESEGPALAFRRAASLLKSLPHAISSSKDLEGLPCLGDQTKAVIEDILEYGQCSKVQDVLCDDRYQTIKLFTSVFGVGLKTAEKWYRMGFHSLEEVQADKAIQFTKMQKAGFLYYDDISAAVCKAEADAIGQIVEETVRLIAPDAIVTLTGGFRRGKEIGHDVDFLITTPEMGKEQLLPKVINLLEKKGLLLYYDLVESTFDITRLPCRKFEAMDHFQKCFAIIKLKKELAAGRVQKDWKAIRVDFVMPPVDNFAFALLGWTGSRQFERDLRRFARHERKMLLDRHALYDKTKKIFLPAKTEEEIFAHLGLDYIPPWQRNA

SEQ ID NO: 547 - protein, 362 aa, Artificial Sequence
  Modified TdT Sequence
MENLYFQGTVSQYACQRRTTMENHNQIFTDAFAILAENAEFNESEGPCLAFRRAASLLKSLPHAISSSKDLEGLPCLGDQTKAVIEDILEYGQCSKVQDVLCDDRYQTIKLFTSVFGVGLKTAEKWYRMGFHSLEEVQADKAIHFTKMQKAGFLYYDDISAAVCKAEADAIGQIVEETVRGIAPDAIVTLTGGFRRGKEIGHDVDFLITTPEAGKEQLLPRVINLLEKKGLLLYYDLVESTFDKTRLPCRKFEAMDHFQKCFAIIKLKKELAAGRVQKDWKAIRVDFVMPPVDNFAFALLGWTGSRQFERDLRRFARHERKMLLDRHALYDKTKKIFLPAKTEEDIFAHLGLDYIPPWQRNA

SEQ ID NO: 548 - protein, 362 aa, Artificial Sequence
  Modified TdT Sequence
MENLYFQGTVSQYACQRRTTMENHNQIFTDAFAILAENAEFNESEGPCLAFRRAASLLKSLPHAISSSKDLEDLPCLGDQTKAVIEDILEYGQCSKVQDVLCDDRYQTIKLFTSVFGVGLKTAEKWYRKGFHSLEEVQADKAIHFTKMQKAGFLYYDDISAAVCKAEADAIGQIVEETVRLIAPDAIVTLTGGFRRGKEIGHDVDFLITTPEMGKEQLLPRVINLLEKKGLLLYYDLVESTFDKTRLPCRKFEAMDHFQKCFAIIKLKQELAAGRVQKDWKAIRVDFVMPPVDCFAFALLGWTGSRQFERDLRRFARHERKMLLDRHALYDKTKKIFLPAKTEEDIFAHLGLDYIPPWQRNA

SEQ ID NO: 549 - protein, 362 aa, Artificial Sequence
  Modified TdT Sequence
MENLYFQGTVSQYACQRRTTMENHNQIFTDAFAILAENAEFNESEGPCLAFRRAASLLKSLPHAISSSKDLEGLPCLGDQTKAVIEDILEYGQCSKVQDVLCDDRYQTIKLFTSVFGVGLKTAEKWYRKGFHSLEEVQADKAIHFTKMQKAGFLYYDDISAAVCKAEADAIGQIVEETVRLITPDAIVTLTGGFRRGKECGHDVDFLITTPEMGKEQLLPKVVNLWEKKGLLLYYDLVESTFDKTRLPCRKFEAMDHFQKCFAIIKLKKELAAGRVQKDWKAIRVDFVMPPVDNFAFALLGWTGSRQFERDLRRFARHERKMLLDRHALYDKRKKIFLPAKTEEDIFAHLGLDYIPPWQRNA

SEQ ID NO: 550 - protein, 362 aa, Artificial Sequence
  Modified TdT Sequence
MENLYFQGTVSQYACQRRTTMENHNQIFTDAFAILAENAEFNESEGPALAFRRAASLLKSLPHAISSSKDLEGLPCLGDQTKGVIEEILEYGQCSKVQDVLCDDRYQTIKLFTSVFGVGLKTAEKWYRKGFHSLEEVQADKAIQFTKMQKAGFLYYDDISAAVCKAEADAIGQIVEETVRLIAPDAIVTLTGGFRRGKECGHDVDFLITTPEMGKEQLLPDVINLLEKKGLLLYYDLVESTFDKTRLPCRKFEAMDHFQKCFAIIKLKKELAAGCVQKDWKAIRVDFVMPPIDNFAFALLGWTGSRQFERDLRRFARHERKMLLDRHALYDKTKKIFLPAKTEEDIFAHLGLDYIPPWQRNA

SEQ ID NO: 551 - protein, 362 aa, Artificial Sequence
  Modified TdT Sequence
MENLYFQGTVSQYACQRRTTMENHNQIFTDAFAILAENAEFNESEGPCLAFRRAASLLKSLPHAISSSKDLEGLPCLGDQTKAVIEDILEYGQCSKVQDVLCDDRYQTIKLFTSVFGVGLKTAEKWYRKGFHSLEEVQADKAIHFTKMQKAGFLYYDDISAAVCKAEADAIGQIVEETVRLIAPDAIVTLTGGFRRGKECGHDVDFLITTPEMGKEQLLPRVINLLEKKGLLLFYDLVESTFDKTRLPCRKFEAMDHFQKCFAIIKLKKELAAGRVQKDWKAIRVDFVMPPVDNFAFALLGWTGSRQFERDLRRFARHERKMLLDRHALYDKTKKIFLPAKSEEDIFAHLGLDYIPPWQRNA

SEQ ID NO: 552 - protein, 362 aa, Artificial Sequence
  Modified TdT Sequence
MENLYFQGTVSQYACQRRTTMENHNQIFTDAFAILAENAEFNESEGPCLAFRRAASLLKSLPHAISSSKDLEGLPCLGDQTKAVIEDILEYGQCSKVQDVLCDDRYQTIKLFTSVFGVGLKTAEKWYRMGFHSLEEVQADKAIHFTKMQKAGFLYYDDISAAVCKAEADAIGQIVEETVRLIAPDAIVTLTGGFRRGKECGHDVDFLITTPEAGKEQLLPKVINLWEKKGLLLYYDLVESTFDKLRLPCRKFEAMDHFQKCFAIIKLKKELAAGRVQKDWKAIRVDFVMPPVDNFAFALLGWTGSRQFERDLRRFARHERKMLLDRHALYDKTKKIFLPAKTEEDIFAHLGLDYIPPWQRNA

SEQ ID NO: 553 - protein, 362 aa, Artificial Sequence
  Modified TdT Sequence
MENLYFQGTVSQYACQRRTTMENHNQVFTDAFAILAENAEFNESEGPALAFRRAASLLKSLPHAISSSKDLEGLPCLGDQTKAVIEDILEYGQCSKVQDVLCDDRYQTIKLFTSVFGVGLKTAEKWYRKGFHSLEEVQADKAIQFTKMQRAGFLYYDDISAAVCKAEADAIGQIVEETVRLIAPDAIVTLTGGFRRGKEIGHDVDFLITTPEAGKEQLLPKVINLLEKKGLLLYYDLVESTFDKTRLPCRKFEAMDHFQKCFAIIKLKKELAAGRVQKDWKAIRVDFVMPPADNFAFALLGWTGSRQFERDLRRFARHERKMLLDRHALYDKTKKIFLPAKTEEDIFAHLGLDYIPPWQRNA

SEQ ID NO: 554 - protein, 362 aa, Artificial Sequence
  Modified TdT Sequence
MENLYFQGTVSQYACQRRTTMENHNQIFTDAFAILAENAEFNESEGPCLAFRRAASLLKSLPHAISSSKDLQGLPCLGDQTKAVIEDILEYGQCSKVQDVLCDDRYQTIKLFTSVFGVGLKTAEKWYRKGFHSFEEVQADKAIHFTKMQRAGFLYYDDISAAVCKAEADAIGQIVEETVRLIAPDAIVTLTGGFRRGKECGHDVDFLITTPEMGKEQLLPKVINLWEKKGLLLYYDLVESTFDKTRLPCRKFEAMDHFQKCFAIIKLKKELAAGRVQKDWKAIRVDFVMPPVDNFAFALLGWTGSRQFERDLRRFARHERKMLLDRHALYDKTKKIFLPAKTEEDIFAHLGLDYIPPWQRNA

SEQ ID NO: 555 - protein, 362 aa, Artificial Sequence
  Modified TdT Sequence
MENLYFQGTVSQYACQRRTTMENHNQIFTDAFAILAENAEFNESEGPCLAFRRAASLLKSLPHAISSSKDLEGLPCLGDQTKAVIEDILEYGQCSKVQDVLCDDRYQTIKLFTSVFGVGLKTAEKWYRKGFHSLEEVQADKAIQFTKMQKAGFLYYDDISAAVCKAEADAIGQIVEETVRLIAPDAIVTLTGGFRRGKECGHDVDFLITTPEMGKEQLLPDVINLLEKKGLLLYYDLVESTFDKTRLPCRKFEAMDHFQKCFAIIKLKKERAAGRVQKDWKAIRVDFVMPPIDNFAFALLGWTGSRQFERDLRRFARHERKMLLDRHALYDKTKRIFLPAKTEEDIFAHLGLDYIPPWQRNA

SEQ ID NO: 556 - protein, 362 aa, Artificial Sequence
  Modified TdT Sequence
MENLYFQGTVSQYACQRRTTMENNNQIFTDAFAILAENAEFNESEGPCLAFLRAASLLKSLPHAISSSKDLEGLPCLGDQTKAVIEDILEYGQCSKVQDVLCDDRYQTIKLFTSVFGVGLKTAEKWYRKGFHSLEEVQADKAIHFTKMQKAGFLYYDDISAAVCKAEADAIGQIVEETVRLIAPDAIVTLTGGFRRGKECGHDVDFLITTPEMGKEQLLPRLINLLEKKGLLLYYDLVESTFDKTRLPCRKFEAMDHFQKCFAIIKLKKELAAGRVQKDWKAIRVDFVMPPVDNFAFALLGWTGSRQFERDLRRFARHERKMLLDRHALYDKTKKIFLPAKTEEDIFAHLGLDYIPPWQRNA

SEQ ID NO: 557 - protein, 362 aa, Artificial Sequence
  Modified TdT Sequence
MENLYFQGTVSQYACQRRTTMENHNQIFTDAFAILAENAEFNENEGPALAFRRAASLLKSLPHAISSSKDLEGLPCLGDQTKAVIEDILEYGQCSKVQDVLCDDRYQTIKLFTSVFGVGLKTAEKWYRKGFHSLEEVQADKAIQFTKMQKAGFLYYDDISAAVCKAEADAIGQIVEETVRLIAPDAIVTLTGGFRRGKEIGHDVDFLITTPEAGREQLLPKVINLLEKKGLLLYYDLVESTFDKTRLPCRKFEAMDHFQKCFAIIKLKKELAAGRVQKDWKAIRVDFVMPPVDNFAFALLGWTGSRQFERDLRRFARHERKMLLDRHALYDKTKKIFLPAKTEEDIFAHLGLDYIPPWQRNA

SEQ ID NO: 558 - protein, 362 aa, Artificial Sequence
  Modified TdT Sequence
MENLYFQGTVSQYACQRRTTMENHNQIFTDAFAILAENAEFNESEGPCLAFRRAASLLKSLPHAISSSKDLEGLPCLGDQTKAVIEDILECGQCSKVQDVLCDDRYQTIKLFTSVFGVGLKTAEKWYRKGFHSLEEVQADKAIHFTKMQKAGFLYYDDISAAVCKAEADAIGQIVEETVRGIAPDAIVTLTGGFRRGKECGHDVDFLITTPEMGKEQLLPKVINLLEKKGLLLYYDLVESTFDKTRLPCRKFEAMDHFQKCFAIIKLKKELAAGRVQKDWKAIRVDFVMPPVDNFAFALLGWTGSRQFERDLRRFARHERKMLLDRHALYDKTKKIFLPAKTEEDIFAHLGLDYIPPWQRNA

SEQ ID NO: 559 - protein, 362 aa, Artificial Sequence
  Modified TdT Sequence
MENLYFQGTVSQYACQRRTTMENHNQIFTDAFAILAENAEFNESEGPALAFLRAASLLKSLPHAISSSKDLEGLPCLGDQTKAVIEDILEYGQCSKVQDVLCDDRYQTIKLFTSVFGVGLKTAEKWYRMGFHSLEEVQADKAIQFTKMQKAGFLYYDDISAAVCKAEADAIGQIVEETVRLIAPDAIVTLTGGFRRGKEIGHDVDFLITTPEMGKEQLLPKVINLLEKKGLLLYYDLVESTFDKTRLPCRKFEAMDHFQKCFAIIKLKKEQAAGRVQKDWKAIRVDFVMPPVDNFAFALLGWTGSRQFERDLRRFARHERKMLLDRHALYDKTKRIFLPAKTEEDIFAHLGLDYIPPWQRNA

SEQ ID NO: 560 - protein, 362 aa, Artificial Sequence
  Modified TdT Sequence
MENLYFQGTVSQYACQRRTTMENHNQIFTDAFAILAENAEFNESEVPALAFRRAASLLKSLPHAISSSKDLEGLPCLGDQTKAVIEDILEYGQCSKVQDVLCDDRYQTIKLFTSVFGVGLKTAEKWYRKGFHSLEEVQADKAIQFTKMQRAGFLYYDDISAAVCKAEADAIGQIVEETVRLIAPDAIVTLTGGFRRGKEIGHDVDFLITTPEMGKEQLLPKVINLLEQKGLLLYYDLVESTFDKTRLPCRKFEAMDHFQKCFAILKLKKELAAGRVQKDWKAIRVDFVMPPVDNFAFALLGWTGSRQFERDLRRFARHERKMLLDRHALYDKTKKIFLPAKTEEDIFAHLGLDYIPPWQRNA

SEQ ID NO: 561 - protein, 362 aa, Artificial Sequence
  Modified TdT Sequence
MENLYFQGTVSQYACQRRTTMENHNQIFTDAFAILAENAEFNESEGPALAFRRAASLLKSLPHAISSSKDLEGLPCLGDQTKAVIEDILEYGQCSKVQDVLCDDRYKTIKLFTSVFGVGLKTAEKWYRKGFHSLEEVQADKAIQFTKMQKAGFLYYDDISAAVCKAEADAIGQIVEETVRKIAPDAIVTLTGGFRRGKECGHDVDFLITTPEMGKEQLLPDVINLLEKKGLLLYYDLVESTFDKTRLPCRKFEAMDHFQKCFAIIKLKKERAAGRVQKDWKAIRVDFVMPPIDNFAFALLGWTGSRQFERDLRRFARHERKMLLDRHALYDKTKKIFLPAKTEEDIFAHLGLDYIPPWQRNA

SEQ ID NO: 562 - protein, 362 aa, Artificial Sequence
  Modified TdT Sequence
MENLYFQGTVSQYACQRRTTMENHNQIFTDAFAILAENAEFNESEGPCLAFRRAASLLKSLPHAISSLKDLEGLPCLGDQTKAVIEDILEYGQCSKVQDVLCDDRYQTIKLFTSVFGVGLKTAEKWYRKGFHSLEEVQADKAIQFTKMQKAGFLYYDDISAAVCKAEADAIGQIVEETVRLIAPDAIVTLTGGFRRGKECGHDVDFLITTPEMGKEQLLPDVINLLEKKGLLLYYDLVESTFDKTRLPCRKFEAMDHFQKCFAIIKLKKELAAGRVQKDWKAIRVDFVMPPIDNFAFTLLGWTGSRQFERDLRRFARHERKMLLDRHALYDKTKKIFLPAKTEEDIFAHLGLDYIPPWQRNA

SEQ ID NO: 563 - protein, 362 aa, Artificial Sequence
  Modified TdT Sequence
MENLYFQGTVSQYACQRRTTMENHNQIFTDAFAILAENAEFNESEGPALAFRRAASLLKSLPHAISSSKDLEGLPCLGDQTKAVIEDILEYGQCSKVQDVLCDDRYQTIKLFTSVFGVGLKTAEKWYRKGFHSLEEVQADKAIHFTKMQKAGFLYYDDISAAVCKAEADAIGQIVEETVRLIAPDAIVTLTGGFRRGKEIGHDVDFLITTPEMGKEQLLPRVINLLEKKGLLLYYDLVESTFDKTRLPCRKFEAMDHFQKCFAIIKLKKELAAGRVQKDWKAIRVDFVMPPIDNFAFALLGWTGSRQFERDLRRFARHERKMLLDRHALYDRTKKIFLPAKTEEDIFAHLGLDYIPPWQRNA

SEQ ID NO: 564 - protein, 362 aa, Artificial Sequence
  Modified TdT Sequence
MENLYFQGTVSQYACQRRTTMENHNQIFTDAFAILAENAEFNESEGPALAFRRAASLLKSLPHAISSSKDLEGLPCLGDQTKAVIEDILEYGQCSKVQDVLCDDRYQTIKLFTSVFGVGLKTAEKWYRKGFHSLEEVQADKAIQFTKMQKAGFLYYDDISAAVCKAEADAIGQIVEETVRLMAPDAIVTLTGGFRRGKECGHDVDFLITTPEQGKEQLLPDLINLLEKKGLLLYYDLVESTFDKTRLPCRKFEAMDHFQKCFAIIKLKKELAAGRVQKDWKAIRVDFVMPPIDNFAFALLGWTGSRQFERDLRRFARHERKMLLDRHALYDKTKKIFLPAKTEEDIFAHLGLEYIPPWQRNA

SEQ ID NO: 565 - protein, 362 aa, Artificial Sequence
  Modified TdT Sequence
MENLYFQGTVSQYACQRRTTMENHNQIFTDAFAILAENAEFNESEGPALAFRRAASLLKSLPHAISSSKDLEGLPCLGDQTKAVIEDILEYGQCSKVQDVLCDDRYQTIKLFTSVFGVGLKTAEKWYRKGFHSLEEVQADKAIQFTKMQKAGFLYYDDISAAVCKAEADAIGQIVEETVRLIAPDAIVTLTGGFRRGKSCGHDVDFIITTPEMGKEQLLPDVINLLEKKGLLLYYDLIESTFDKTRLPCRKFEAMDHFQKCFAIIKLKKELAAGRVQKDWKAIRVDFVMPPIDNFAFALLGWTGSRQFERDLRRFARHERKMLLDRHALYDKTKKIFLPAKTEEDIFAHLGLDYIPPWQRNA

SEQ ID NO: 566 - protein, 362 aa, Artificial Sequence
  Modified TdT Sequence
MENLYFQGTVSQYACQRRTTMENHNQIFTDAFAILAENAEFNESEGPCLAFRRAASLLKSLPHAISSSKDLEDLPCLGDQTKAVIEDILEYGQCSKVQDVLCDDRYQTIKLFTSVFGVGLKTAEKWYRKGFHSLEEVQADKAIHFTKMQKAGFLYYDDISAAVCKAEADAIGQIVEETVRGIAPDAIVTLTGGFRRGKEIGHDVDFLITTPEMGKEQLLPRVINLLEQKGLLLYYDLVESTFDKTRLPCRKFEAMDHFQKCFAIIKLKKELAAGRVQKDWKAIRVDFVLPPVDNFAFALLGWTGSRQFERDLRRFARHERKMLLDRHALYDKTKKIFLPAKTEEDIFAHLGLDYIPPWQRNA

SEQ ID NO: 567 - protein, 362 aa, Artificial Sequence
  Modified TdT Sequence
MENLYFQGTVSQYACQRRTTMENHNQIFTDAFAILAENAEFNESEGPALAFRRAASLLKSLPHAISSSKDLEGLPCLGEQTKAVIEDILEYGQCSKVQDVLCDDRYQTIKLFTSVFGVGLKTAEKWYRKGFHSLEEVQADKAIQFTKMQKAGFLYYDDISAAVCKAEADAIGQIVEETVRLIAPDAIVTLTGGFRRGKECGHDVDFLITTPEMGKEQLLPDVMNLLEKKGLLLYYDLVESTFDKTRLPCRKFEAMDHFQKCFAIIKLKKELAAGRVQKDWKAIRVDFVMPPADNFAFALLGWTGSRQFERDLRRFARHERKMLLDRHALYDKTKKIFLPAKTEEDIFAHLGLDYIPPWQRNA

SEQ ID NO: 568 - protein, 362 aa, Artificial Sequence
  Modified TdT Sequence
MENLYFQGTVSQYACQRRTTMENHNQIFTDAFAILAENAEFNESEGPALAFRRAASLLKSLPHAISSSKDLEGLPCLGDQTKAVIEDILEYGQCSKVQDVLCDDRYQTIKLFTSVFGVGLKTAEKWYRMGFHSLEEVQADKAIQFTKMQKAGFLYYDDISAAVCKAEADAIGQIVEETVRLIAPDAIVTLTGGFRRGKEIGHDVDFLITTPEMGKEQLLPKVIDLLEKKGLLLYYELVESTFDKTRLPCRKFEAMDHFQKCFAIIKLKKELAAGRVQKDWKAIRVDFVMPPVDNFAFALLGWTGSRQFERDLRRFARHERKMLLDRHALYDKTKKIFLPAKTEEDIFAHLGLDYIPPWQRNA

SEQ ID NO: 569 - protein, 362 aa, Artificial Sequence
  Modified TdT Sequence
MENLYFQGTVSQYACQRRTTMENHNQIFTDAFAILAENAEFNESEGPCLAFRRAASLLKSLPHAISSSKDLEGLPCLGDQTKAVIEDILEYGQCSKVQDVLCDDRYQTIKLFTSVFGVGLKTAEKWYRKGFHSFEEVQADKAIHFTKMQKAGFLYYDDISAAVCKAEADAIGQIVEETVRLIAPDAIVTLTGGFRRGKECGHDVDFLITTPEMGKEQLLPKVIDLWEKKGLLLYYDLVESTFDKTRLPCRKFEAMDHFQKCFAIIKLKKELAAGRVQKDWKAIRVDFVMPPVDNFAFALLGWTGSRQFERDLRRFARHERKMLLDRHALYDKRKKIFLPAKTEEDIFAHLGLDYIPPWQRNA

SEQ ID NO: 570 - protein, 362 aa, Artificial Sequence
  Modified TdT Sequence
MENLYFQGTVSQYACQRRTTMENHNQIFTDAFAILAENAEFNESEGPALAFRRAASLLKSLPHAISSSKDLEGLPCLGDQTKAVIEDILEYGQCSKVQDVLCDDRYQTIKLFTSVFGVGLKTAEKWYRKGFHTLEEVQADKAIQFTKMQKAGFLYYDDISAAVCKAEADAIGQIVEETVHLIAPDAIVTLTGGFRRGKEIGHDVDFLITTPEQGKEQLLPKVINLLEKKGLLLYYDLVESTFDKTRLPCRKFEAMDHFQKCFAIIKLKKELAAGRVQKDWKAIRVDFVMPPVDNFAFALLGWTGSRQFERDLRRFARHERKMLLDRHALYDKTKKIFLPAKTEEDIFAHLGLDYIPPWQRNA

SEQ ID NO: 571 - protein, 362 aa, Artificial Sequence; identical to SEQ ID NO: 449
  Modified TdT Sequence

SEQ ID NO: 572 - protein, 362 aa, Artificial Sequence
  Modified TdT Sequence
MENLYFQGTVSQYACQRRTTMENHNQIFTDAFAILAENAEFNENEGPALAFRRAASLLKSLPHAISSLKDLEGLPCLGDQTKAVIEDILEYGQCSKVQDVLCDDRYQTIKLFTSVFGVGLKTAEKWYRKGFHSLEEVQADKAIQFTKMQKAGFLYYDDISAAVCKAEADAIGQIVEETVRLIAPDAIVTLTGGFRRGKEIGHDVDFLITTPEMGKEQLLPKVINLLEKKGLLLYYDLVESTFDITRLPCRKFEAMDHFQKCFAIIKLKKELAAGRVQKDWKAIRVDFVMPPVDNFAFALLGWTGSRQFERDLRRFARHERKMLLDRHALYDKTKKIFLPAKTEEDIFAHLGLDYIPPWQRNA

SEQ ID NO: 573 - protein, 362 aa, Artificial Sequence
  Modified TdT Sequence
MENLYFQGTVSQYACQRRTTMENHNQIFTDAFAILAENAEFNESEGPALAFRRAASLLKSLPHAISSSKDLEGLPCLGDQTKAVIEDILEYGQCSKVQDVLCDDRYQTIKLFTSVFGVGLKTAEKWYRKGFHSLEEVQADKAIQFTKMQKAGFLYYDDISAAVCKAEADAIGHIVEETVRLIAPDAIVTLTGGFRRGKECGHDVDFLITTPEQGKEQLLPDVINLLEKKGLLLYYDLIESTFDKTRLPCRKFEAMDHFQKCFAIIKLKKELAAGRVQKDWKAIRVDFVMPPIDNFAFALLGWTGSRQFERDLRRFARHERKMLLDRHALYDKTKKIFLPAKTEEDIFAHLGLDYIPPWQRNA

SEQ ID NO: 574 - protein, 362 aa, Artificial Sequence
  Modified TdT Sequence
MENLYFQGTVSQYACQRRTTMENHNQIFTDAFAILAENAEFNESEGPCVAFRRAASLLKSLPHAISSSKDLEGLPCLGDQTKAVIEDILEYGQCSKVQDVLCDDRYQTIKLFTSVFGVGLKTAEKWYRKGFHSLEEVQADKAIHFSKMQKAGFLYYDDISAAVCKAEADAIGQIVEETVRLIAPDAIVTLTGGFRRGKECGHDVDFLITTPEMGREQLLPKVINLWEKKGLLLYYDLVESTFDKTRLPCRKFEAMDHFQKCFAIIKLKKELAAGRVQKDWKAIRVDFVMPPVDNFAFALLGWTGSRQFERDLRRFARHERKMLLDRHALYDKTKKIFLPAKTEEDIFAHLGLDYIPPWQRNA

SEQ ID NO: 575 - protein, 362 aa, Artificial Sequence
  Modified TdT Sequence
MENLYFQGTVSQYACQRRTTMENHNQIFTDAFAILAENAEFNESEGPALAFRRAASLLKSLPHAISSSKDLEGLPCLGDQTKAVIEDILEYGQCSKVQDVLCDDRYKTIKLFTSVFGVGLKTAEKWYRKGFHSLEEVQADKAIQFTKMQKAGFLYYDDISAAVCKAEADAIGCIVEETVRLIAPDAIVTLTGGFRRGKECGHDVDFLITTPEMGKEQLLPKVINLLEKKGLLLYYDLVESTFDKTRLPCRKFEAMDHFQKCFAIIKLKKELAAGRVQKDWKAIRVDFVMPPVDNFAFALLGWTGSRQFERDLRRFARHERKMLLDRHALYDKTKKIFLPAKTEEDIFAHLGLDYIPPWQRNA

SEQ ID NO: 576 - protein, 362 aa, Artificial Sequence
  Modified TdT Sequence
MENLYFQGTVSQYACQRRTTMENHNQIFTDAFAILAENAEFNESEGPCVAFRRAASLLKSLPHAISSSKDLEGLPCLGDQTKAVIEDILEYGQCSKVQDVLCDDRYQTIKLFTSVFGVGLKTAEKWYRKGFHSLEEVQADKAIHFTKMQKAGFLYYDDISAAVCKAEADAIGQIVEETVRLIAPDAIVTLTGGFRRGKEIGHDVDFLITTPEMGKEQLLPRVINLLEKKGLLLYYDLVESTFDKTRLPCRKFEAMDHFQKCFAIIKLKKELADGRVQKDWKAIRVDFVMPPVDNFAFALLGWTGSRQFERDLRRFARHERKMLLDRHALYDRTKKIFLPAKTEEDIFAHLGLDYIPPWQRNA

SEQ ID NO: 577 - protein, 362 aa, Artificial Sequence
  Modified TdT Sequence
MENLYFQGTVSQYACQRRTTMENHNQIFTDAFAILAENAEFNESEGPALAFRRAASLLKSLPHAISSSKDLEDLPCLGDQTKAVIEDILEYGQCSKVQDVLCDDRYQTIKLFTSVFGVGLKTAEKWYRKGFHSLEEVQADKAIHFTKMQKAGFLYYDDISAAVCKAEADAIGQIVEETVRLIAPDAIVTLTGGFRRGKEIGHDVDFLITTPEMGKEQLLPRVINLLEKKGLLLYYDLVESTFDKTRLPCRKFEAMDHFQKCFAIIKLKKELAAGRVQKDWKAIRVDFVMPPVDNFAFALLGWTGSRQFERDLRRFARHERKMLLDRHALYDKTKKIFLPAKSEEDIFAHLGLDYIPPWQRNA

SEQ ID NO: 578 - protein, 362 aa, Artificial Sequence
  Modified TdT Sequence
MENLYFQGTVSQYACQRRTTMENHNQIFTDAFAILAENAEFNESEGPCLAFRRAASLLKSLPHAISRSKDLEGLPCLGDQTKAVIEDILEYGQCSKVQDVLCDDRYQTIKLFTSVFGVGLKTAEKWYRKGFHSLEDVQADKAIHFTKMQKAGFLYYDDISAAVCKAEADAIGQIVEETVRLIAPDAIVTLTGGFRRGKECGHDVDFLITTPEMGKEQLLPKVINLWEKKGLLLYYDLVESTFDKTRLPCRKFEAMDHFQKCFAIIKLKKELAAGRVQKDWKAIRVDFVMPPIDNFAFALLGWTGSRQFERDLRRFARHERKMLLDRHALYDKTKKIFLPAKTEEDIFAHLGLDYIPPWQRNA

SEQ ID NO: 579 - protein, 362 aa, Artificial Sequence
  Modified TdT Sequence
MENLYFQGTVSQYACQRRTTMENHNQIFTDAFAILAENAEFNESEGPCLAFRRAASLLKSLPHAISSSKDLEGLPCLGDRTKAVIEDILEYGQCSKVQDVLCDDRYQTIKLFTSVFGVGLKTAEKWYRKGFHSLEEVQADKAIHFTKMQKAGFLYYDDISAAVCKAEADAIGQIVEETVRLIAPDAILTLTGGFRRGKECGHDVDFLITTPEMGKEQLLPKVINLWEKKGLLLYYDLVESTFDKTRLPCRKFEAMDHFQKCFAIIKLKKQLAAGRVQKDWKAIRVDFVMPPVDNFAFALLGWTGSRQFERDLRRFARHERKMLLDRHALYDKTKKIFLPAKTEEDIFAHLGLDYIPPWQRNA

SEQ ID NO: 580 - protein, 362 aa, Artificial Sequence
  Modified TdT Sequence
MENLYFQGTVSQYACQRRTTMENHNQIFTDAFAILAENAEFNENEGPALAFRRAASLLKSLPHAISSSKDLEGLPCLGDQTKAVIEDILEYGQCSKVQDVLCDDRYQTIKLFTSVFGVGLKTAEKWYRKGFHSLEEVQADKAIQFTKMQKAGFLYYDDISAAVCKAEADAIGQIVEETVRLIAPDAIVTLTGGFRRGKEIGHDVDFLITTPEMGKEQLLPKVINLLEKKGLLLYYHLVESTFDKTRLPCRKFEAMDHFQKCFAIIKLKKELAAGRVQKDWKAIRVDFVMPPIDNFAFALLGWTGSRQFERDLRRFARHERKMLLDRHALYDKTKKIFLPAKTEEDIFAHLGLDYIPPWQRNA

SEQ ID NO: 581 - protein, 362 aa, Artificial Sequence
  Modified TdT Sequence
MENLYFQGTVSQYACQRRTTMENNNQIFTDAFAILAENAEFNESEGPAVAFRRAASLLKSLPHAISSSKDLEGLPCLGDQTKAVIEDILEYGQCSKVQDVLCDDRYQTIKLFTSVFGVGLKTAEKWYRKGFHSLEEVQADKAIHFTKMQKAGFLYYDDISAAVCKAEADAIGQIVEETVRLIAPDAIVTLTGGFRRGKEIGHDVDFLITTPEMGKEQLLPRVINLLEKKGLLLYYDLVESTFDKTRLPCRKFEAMDHFQKCFAIIKLKKELAAGRVQKDWKAIRVDFVMPPVDNFAFALLGWTGSRQFERDLRRFARHERKMLLDRHALYDKTKKIFLPAKTEEDIFAHLGLDYIPPWQRNA

SEQ ID NO: 582 - protein, 362 aa, Artificial Sequence
  Modified TdT Sequence
MENLYFQGTVSQYACQRRTTMENHNQIFTDAFAILAENAEFNESEGPALAFRRAASLLKSLPHAISSSKDLEGLPCLGDQTKAVIEEILEYGQCSKVQDVLCDDRYQTIKLFTSVFGVGLKTAEKWYRKGFHSLEEVQADKAIQFTKMQKAGFLYYDDISAAVCKAEADAIGQIVEETVRKIAPDAIVTLTGGFRRGKEIGHDVDFLITTPEMGKEQLLPKVINLLEKKGLLLYYDLVESTFDKTRLPCRKFEAMDHFQKCWAIIKLKKELAAGRVQKDWKAIRVDFVMPPVDNFAFALLGWTGSRQFERDLRRFARHERKMLLDRHALYDKTKKIFLPAKTEEDIFAHLGLDYIPPWQRNA

SEQ ID NO: 583 - protein, 362 aa, Artificial Sequence
  Modified TdT Sequence
MENLYFQGTVSQYACQRRTTMENHNQIFTDAFAILAENAEFNESEGPCLAFRRAASLLKSLPHAISSSKDLEGLPCLGDRTKAVIEDILEYGQCSKVQDVLCDDRYQTIKQFTSVFGVGLKTAEKWYRKGFHSLEEVQADKAIHFTKMQKAGFLYYDDISAAVCKAEADAIGQIVEETVRLIAPDAIVTLTGGFRRGKECGHDVDFLITTPEMGKEQLLPKVINLWEKKGLLLYYDLVESTFDKTRLPCRKFEAMDNFQKCFAIIKLKKELAAGRVQKDWKAIRVDFVMPPVDNFAFALLGWTGSRQFERDLRRFARHERKMLLDRHALYDKTKKIFLPAKTEEDIFAHLGLDYIPPWQRNA

SEQ ID NO: 584 - protein, 362 aa, Artificial Sequence
  Modified TdT Sequence
MENLYFQGTVSQYACQRRTTMENHNQIFTDAFAILAENAEFNESEGPALAFRRAASLLKSLPHAISSSKDLEGLPCLGDQTKAVIEDILEYGQCSKVQDVLCDDRYQTIKLFTSVFGVGLKTAEKWYRKGFHSLEEVQADKAIQFTKMQKAGFLYYDDISAAVCKAEADAIGQIVEETVRLIAPDAIVTLTGGFRRGKECGHDVDFLITTPEMGKEQLLPDVINLLEKKGLLLYYDLIESTFDKTRLPCRKFEAMDHFQKCFAIIRLKKELAAGRVQKDWKAIRVDFVMPPIDNFAFALLGWTGSRQFERDLRRFARHERKMLLDRHALYDKTKKIFLPAKTEEDIFAHLGLEYIPPWQRNA

SEQ ID NO: 585 - protein, 362 aa, Artificial Sequence
  Modified TdT Sequence
MENLYFQGTVSQYACQRRTTMENHNQIFTDAFAILAENAEFNESEGPCLAFRRAASLLKSLPHAISSSKDLEGLPCLGDQTKAVMEDILEYGQCSKVQDVLCDDRYQTIKLFTSVFGVGLKTAEKWYRKGFHSLEEVQADKAIHFTKMQKAGFLYYDDISAAVCKAEADAIGQIVEETVRLIAPDAILTLTGGFRRGKECGHDVDFLITTPEMGKEQLLPKVINLWEKKGLLLYYDLVESTFDKSRLPCRKFEAMDHFQKCFAIIKLKKELAAGRVQKDWKAIRVDFVMPPVDNFAFALLGWTGSRQFERDLRRFARHERKMLLDRHALYDKTKKIFLPAKTEEDIFAHLGLDYIPPWQRNA

SEQ ID NO: 586 - protein, 362 aa, Artificial Sequence
  Modified TdT Sequence
MENLYFQGTVSQYACQRRTTMENHNQIFTDAFAILAENAEFNESEGPCLAFRRAASLLKSLPHAISSSKDLEGLPCLGDQTKAVIEDILEYGQCSKVQDVLCDDRYQTIKLFTSVFGVGLKTAEKWYRKGFHSLEEVQADKAIHFTKMQKAGFLYYDDISAAVCKAEADAIGQIVEETVRGIAPDAILTLTGGFRRGKECGHDVDFLITTPEMGKEQLLPKVIDLWEKKGLLLYYDLVESTFDKTRLPCRKFEAMDHFQKCFAIIKLKKELAAGRVQKDWKAIRVDFVMPPVDNFAFALLGWTGSRQFERDLRRFARHERKMLLDRHALYDKTKKIFLPAKTEEDIFAHLGLDYIPPWQRNA

SEQ ID NO: 587 - protein, 362 aa, Artificial Sequence
  Modified TdT Sequence
MENLYFQGTVSQYACQRRTTMENHNQVFTDAFAILAENAEFNESEGPCLAFRRAASLLKSLPHAISSSKDLEGLPCLGDQTKAVIEDILEYGQCSKVQDVLCDDRYQTIKLFTSVFGVGPKTAEKWYRKGFHSLEEVQADKAIHFTKMQKAGFLYYDDITAAVCKAEADAIGQIVEETVRLIAPDAIVTLTGGFRRGKEIGHDVDFLITTPEMGKEQLLPRVINLLEKKGLLLYYDLVESTFDKTRLPCRKFEAMDHFQKCFAIIKLKKELAAGRVQKDWKAIRVDFVMPPVDNFAFALLGWTGSRQFERDLRRFARHERKMLLDRHALYDKTKKIFLPAKTEEDIFAHLGLDYIPPWQRNA

SEQ ID NO: 588 - protein, 362 aa, Artificial Sequence
  Modified TdT Sequence
MENLYFQGTVSQYACQRRTTMENHNQIFTDAFAILAENAEFNESEGPCLAFRRAASLLKSLPHAISSSKDLQGLPCLGDQTKAVIEDILEYGQCSKVQDVLCDDRYQTIKLFTSVFGVGLKTAEKWYRKGFHSLEEVQADKAIHFTKMQKAGFLYYDDISAAVCKAEADAIGQIVEETVRLIAPDAIVTLTGGFRRGKECGHDVDFLITTPEMGKEQLLPRVINLWEKKGLLLYYDLVESTFDKTRLPCRKFEAMDHFQKCFAIIKLKKELAAGRVQKDWKAIRVDFVMPPVDRFAFALLGWTGSRQFERDLRRFARHERKMLLDRHALYDKTKKIFLPAKTEEDIFAHLGLDYIPPWQRNA

SEQ ID NO: 589 - protein, 362 aa, Artificial Sequence
  Modified TdT Sequence
MENLYFQGTVSQYACQRRTTMENHNQIFTDAFAILAENAEFNENEGPALAFRRAASLLKSLPHAISSSKDLEGLPCLGDQTKAVIEDILEYGQCSKVQDVLCDDRYQTIKLFTSVFGVGLKTAEKWYRKGFHSLEEVQADKAIQFTKMQKAGFLYYDDISAAVCKAEADAIGQIVEETVRLIAPDAIVTLTGGFRRAKECGHDVDFLITTPEMGKEQLLPDVINLLEKKGLLLYYDLVESTFDKTRLPCRKFEAMDHFQKCFAIIKLKKELAAGCVQKDWKAIRVDFVMPPIDNFAFALLGWTGSRQFERDLRRFARHERKMLLDRHALYDKTKKIFLPAKTEEDIFAHLGLDYIPPWQRNA

SEQ ID NO: 590 - protein, 362 aa, Artificial Sequence
  Modified TdT Sequence
MENLYFQGTVSQYACQRRTTMENHNQIFTDAFAILAENAEFNESEGPALAFRRAASLLKSLPHAISSSKDLEGLPCLGDQTKAVIEDILEYGQCSKVQDVLCDDRYQTIKLFTSVFGVGLKTAEKWYRKGFHSLEEVQADKAIHFTKMQRAGFLYYDDISAAVCKAEADAIGQIVEETVHGIAPDAIVTLTGGFRRGKEIGHDVDFLITTPEMGKEQLLPRVINLLEKKGLLLYYDLVESTFDKTRLPCRKFEAMDHFQKCFAIIKLKKELAAGRVQKDWKAIRVDFVMPPVDNFAFALLGWTGSRQFERDLRRFARHERKMLLDRHALYDKTKKIFLPAKTEEDIFAHLGLDYIPPWQRNA

SEQ ID NO: 591 - protein, 362 aa, Artificial Sequence
  Modified TdT Sequence
MENLYFQGTVSQYACQRRTTMENHNQIFTDAFAILAENAEFNESEGPCLAFRRAASLLKSLPHAISSSKDLEGLPCLGDQTKAVIEDILEYGQCSKVQDVLCDDRYQTIKLFTSVFGVGLKTAEKWYRKGFHSLEEVQADKAIHFTKMQKAGFLYYDDISAAVCKAEADAIGQIVEETVRGIAPDAIVTLTGGFRRGKEIGHDVDFLITTPEMGREQLLPRVINLLEKKGLLLYYDLVESTFDKTRLPCRKFEAMDHFQKCFAIIKLKKELAAGRVQKDWKAIRVDFVMPPVDCFAFALLGWTGSRQFERDLRRFARHERKMLLDRHALYDKTKKIFLPAKTEEDIFAHLGLDYIPPWQRNA

SEQ ID NO: 592 - protein, 362 aa, Artificial Sequence
  Modified TdT Sequence
MENLYFQGTVSQYACQRRTTMENHNQIFTDAFAILAENAEFNESEGPCLAFRRAASLLKSLPHAISSSKDLEGLPCLGDQTKAVIEDILEYGQCSKVQDVLCDDRYQTIKLFTSVFGVGLKTAEKWYRKGFHSLEEVQADKAIHFTKMQKAGFLYYDDISAAVCKAEADAIGQIVEETVRGIAPDAIVTLTGGFRRGKEIGHDVDFLITTPEMGKEQLLPRLIDLLEKKGLLLYYDLVESTFDKTRLPCRKFEAMDHFQKCFAIIKLKKELAAGRVQKDWKAIRVDFVMPPIDNFAFALLGWTGSRQFERDLRRFARHERKMLLDRHALYDKTKKIFLPAKTEEDIFAHLGLDYIPPWQRNA

SEQ ID NO: 593 - protein, 362 aa, Artificial Sequence
  Modified TdT Sequence
MENLYFQGTVSQYACQRRTTMENHNQIFTDAFAILAENAEFNESEVPALAFRRAASLLKSLPHAISSSKDLEGLPCLGDQTKAVIEDILEYGQCSKVQDVLCDDRYQTIKLFTSVFGVGLKTAEKWYRKGFHSLEEVQADKAIQFTKMQKAGFLYYDDISAAVCKAEADAIGQIVEETVHLIAPDAIVTLTGGFRRGKEIGHDVDFLITTPEMGKEQLLPKVIDLLEKKGLLLYYDLVESTFDKTRLPCRKFEAMDHFQKCWAIIKLKKELAAGRVQKDWKAIRVDFVMPPVDNFAFALLGWTGSRQFERDLRRFARHERKMLLDRHALYDKTKKIFLPAKTEEDIFAHLGLDYIPPWQRNA

SEQ ID NO: 594 - protein, 362 aa, Artificial Sequence
  Modified TdT Sequence
MENLYFQGTVSQYACQRRTTMENHNQIFTDAFAILAERAEFNESEGPCLAFRRAASLLKSLPHAISSSKDLEGLPCLGDQTKAVIEDIFEYGQCSKVQDVLCDDRYQTIKLFTSVFGVGLKTAEKWYRKGFHSLEEVQADKAIHFTKMQKAGFLYYDDISAAVCKAEADAIGQIVEETVRLIAPDAIVTLTGGFRRGKEIGHDVDFLITTPEMGKEQLLPRVINLLEKKGLLLYYDLVESTFDKTRLPCRKFEAMDHFQKCFAIIKLKKELAAGRVQKDWKAIRVDFVMPPIDNFAFALLGWTGSRQFERDLRRFARHERKMLLDRHALYDKTKKIFLPAKTEEDIFAHLGLDYIPPWQRNA

SEQ ID NO: 595 - protein, 362 aa, Artificial Sequence
  Modified TdT Sequence
MENLYFQGTVSQYACQRRTTMENHNQIFTDAFAILAENAEFNESEGPALAFRRAASLLKSLPHAISSSKDLEGLPCLGDQTKAVIEEILEYGQCSKVQDVLCDDRYKTIKLFTSVFGVGLKTAEKWYRKGFHSLEEVQADRAIQFTKMQKAGFLYYDDISAAVCKAEADAIGQIVEETVRLIAPDAIVTLTGGFRRGKEIGHDVDFLITTPEMGKEQLLPKVINLLEKKGLLLYYDLVESTFDKTRLPCRKFEAMDHFQKCFAIIKLKKELAAGRVQKDWKAIRVDFVMPPVDNFAFALLGWTGSRQFERDLRRFARHERKMLLDRHALYDKTKKIFLPAKTEEDIFAHLGLDYIPPWQRNA

SEQ ID NO: 596 - protein, 362 aa, Artificial Sequence
  Modified TdT Sequence
MENLYFQGTVSQYACQRRTTMENHNQIFTDAFAILAENAEFNESEGPCLAFRRAASLLKSLPHAISSSKDLEGLPCLGDQTKAVIEDILEYGQCSKVQDVLCDDRYQTIKQFTSVFGVGLKTAEKWYRKGFHSLEEVQADKAIHFTKMQKAGFLYYDDISAAVCKAEADAIGQIVEETVRLIAPDAIVTLTGGFRRGKECGHDVDFLITTPEMGKEQLLPKIINLWEKKGLLLYYDLVESTFDKSRLPCRKFEAMDHFQKCFAIIKLKKELAAGRVQKDWKAIRVDFVMPPVDNFAFALLGWTGSRQFERDLRRFARHERKMLLDRHALYDKTKKIFLPAKTEEDIFAHLGLDYIPPWQRNA

SEQ ID NO: 597 - protein, 362 aa, Artificial Sequence
  Modified TdT Sequence
MENLYFQGTVSQYACQRRTTMENHNQIFTDAFAILAENAEFNESEGPCVAFRRAASLLKSLPHAISSSKDLEGLPCLGDQTKAVIEDILEYGQCSKVQDVLCDDRYQTIKLFTSVFGVGLKTAEKWYRKGFHSLEEVQADKAIHFTKMQKAGFLYYDDISAAVCKAEADAIGQIVEETVRLIAPDAIVTLTGGFRRGKECGHDVDFLITTPEMGKEQLLPKIINLWEQKGLLLYYDLVESTFDKTRLPCRKFEAMDHFQKCFAIIKLKKELAAGRVQKDWKAIRVDFVMPPVDNFAFALLGWTGSRQFERDLRRFARHERKMLLDRHALYDKTKKIFLPAKTEEDIFAHLGLDYIPPWQRNA

SEQ ID NO: 598 - protein, 362 aa, Artificial Sequence
  Modified TdT Sequence
MENLYFQGTVSQYACQRRTTMENHNQIFTDAFAILAENAEFNESEGPALAFRRAASLLKSLPHAISSSKDLEGLPCLGDQTKAVIEDILEYGQCSKVQDVLCDDRYQTIKLFTSVFGVGLKTAEKWYRKGFHSLEEVQADKAIQFTKMQKAGFLYYDDISAAVCKAEADAIGQIVEETVRKIAPDAIVTLTGGFRRGKECGHDVDFLITTPEMGKEQLLPDVINLLEKKGLLLYYDLVESTFDKTRLPCRRFEAMDHFQKCFAIIKLKKELAAGRVQKDWKAIRVDFVMPPADNFAFALLGWTGSRQFERDLRRFARHERKMLLDRHALYDKTKKIFLPAKTEEDIFAHLGLEYIPPWQRNA

SEQ ID NO: 599 - protein, 362 aa, Artificial Sequence
  Modified TdT Sequence
MENLYFQGTVSQYACQRRTTMENRNQIFTDAFAILAENAEFNESEGPALAFRRAASLLKSLPHAISSSKDLEGLPCLGDQTKAVIEDILEYGQCSKVQDVLCDDRYKTIKLFTSVFGVGLKTAEKWYRKGFHSLEEVQADKAIQFTKMQKAGFLYYDDISAAVCKAEADAIGQIVEETVRLIAPDAIVTLTGGFRRGKECGHDVDFLITTPEKGKEQLLPDVINLLEKKGLLLYYDLVESTFDKTRLPCRKFEAMDHFQKCFAIIKLKKELAAGRVQKDWKAIRVDFVMPPIDNFAFALLGWTGSRQFERDLRRFARHERKMLLDRHALYDKTKKIFLPAKTEEDIFAHLGLDYIPPWQRNA

SEQ ID NO: 600 - protein, 362 aa, Artificial Sequence
  Modified TdT Sequence
MENLYFQGTVSQYACQRRTTMENHNQIFTDAFAILAENAEFNENEGPALAFRRAASLLKSLPHAISSSKDLEGLPCLGDQTKAVIEEILEYGQCSKVQDVLCDDRYQTIKLFTSVFGVGLKTAEKWYRKGFHSLEEVQADKAIQFTKMQKAGFLYYDDISAAVCKAEADAIGQIVEETVRLIAPDAIVTLTGGFRRGKECGHDVDFLITTPEQGKEQLLPDVINLLEKKGLLLYYDLVESTFDKTRLPCRKFEAMDHFQKCFAIIKLKKELAAGRVQKDWKAIRVDFVMPPIDNFAFALLGWTGSRQFERDLRRFARHERKMLLDRHALYDKTKKIFLPAKTEEDIFAHLGLEYIPPWQRNA

SEQ ID NO: 601 - protein, 362 aa, Artificial Sequence
  Modified TdT Sequence
MENLYFQGTVSQYACQRRTTMENHNQIFTDAFAILAENAEFNESEGPALAFRRAASLLKSLPHAISSSKDLEGLPCLGDQTKAVIEDILEYGQCSKVQDVLCDDRYQTIKLFTSVFGVGLKTAEKWYRKGFHSLEEVQADKAIQFTKMQKAGFLYYDDISAAVCKAEADAIGQIVEETVRLIAPDAIVTLTGGFRRGKEIGHDVDFLITTPEAGKEQLLPKVIDLLEKKGLLLFYDLVESTFDKTRLPCRKFEAMDHFQKCFAIIKLKKELAAGRVQKDWKAIRVDFVMPPVDNFAFALLGWTGSRQFERDLRRFARHERKMLLDRHALYDRTKKIFLPAKTEEDIFAHLGLDYIPPWQRNA

SEQ ID NO: 602 - protein, 362 aa, Artificial Sequence
  Modified TdT Sequence
MENLYFQGTVSQYACQRRTTMENHNQIFTDAFAILAENAEFNESEGPCLAFRRAASLLKSLPHAISCSKDLEGLPCLGDQTKAVIEDILEYGQCSKVQDVLCDDRYQTIKLFTSVFGVGLKTAEKWYRKGFHSLEEVQANKAIHFTKMQKAGFLYYDDISAAVCKAEADAIGQIVEETVRLIAPDAIVTLTGGFRRGKECGHDVDFLITTPEMGKEQLLPKVINLWEKKGLLLYYDLVESTFDKTRLPCRKFEAMDHFQKCFAIIKLKKELAAGRVQKDWKAIRVDFVMPPVDNFAFALLGWTGSRQFERDLRRFARHERKMLLDRHALYDRTKKIFLPAKTEEDIFAHLGLDYIPPWQRNA

SEQ ID NO: 603 - protein, 362 aa, Artificial Sequence
  Modified TdT Sequence
MENLYFQGTVSQYACQRRTTMENHNQIFTDAFAILAENAEFNESEGPCLAFRRAASLLKSLPHAISSSKDLEGLPCLGDQTKAVMEDILEYGQCSKVQDVLCDDRYQTIKLFTSVFGVGLKTAEKWYRKGFHSLEEVQADKAIHFTKMQKAGFLYYDDISAAVCKAEADAIGQIVEETVRLIAPDAIVTLTGGFRRGKECGHDVDFLITTPEMGKEQLLPKVINLWEKKGLLLYYDLVESTFDKTRLPCRKFEAMDHFQKCFAIIKLKKELAAGRVQKDWKAIRVDFVMPPIDNFAFALLGWTGSRQFERDLRRFARHERKMLLDRHALYDRTKKIFLPAKTEEDIFAHLGLDYIPPWQRNA

SEQ ID NO: 604 - protein, 362 aa, Artificial Sequence
  Modified TdT Sequence
MENLYFQGTVSQYACQRRTTMENHNQIFTDAFAILAENAEFNESEGPALAFRRAASLLKSLPHAISSSKDLEGLPCLGDQTKAVIEDILEYGQCSKVQDVLCDDRYQTIKLFTSVFGVGLKTAEKWYRKGFHSLEEVQADKAIQFTKMQRAGFLYYDDISAAVCKAEADAIGQIVEETVRLIAPDAIVTLTGGFRRGKEIGHDVDFLITTPEMGKEQLLPKVINLLEKKGLLLFYELVESTFDKTRLPCRKFEAMDHFQKCFAIIKLKKELAAGRVQKDWKAIRVDFVMPPVDNFAFALLGWTGSRQFERDLRRFARHERKMLLDRHALYDKTKKIFLPAKTEEDIFAHLGLDYIPPWQRNA

SEQ ID NO: 605 - protein, 362 aa, Artificial Sequence
  Modified TdT Sequence
MENLYFQGTVSQYACQRRTTMENHNQIFTDAFAILAENAEFNESEGPALAFRRAASLLKSLPHAISSSKDLEGLPCLGDQTKAVIEDILEYGQCSKVQDVLCDDRYQTIKLFTSVFGVGLKTAEKWYRKGFHSLEEVQADKAIQFTKMQKAGFLYYDDISAAVCKAEADAIGQIVEETVRLIAPDAIVTLTGGFRRGKSCGHDVDFLITTPEQGKEQLLPDVINLLEKKGLLLYYDLVESTFDKTRLPCRRFEAMDHFQKCFAIIKLKKELAAGRVQKDWKAIRVDFVMPPIDNFAFALLGWTGSRQFERDLRRFARHERKMLLDRHALYDKTKKIFLPAKTEEDIFAHLGLDYIPPWQRNA

SEQ ID NO: 606 - protein, 362 aa, Artificial Sequence
  Modified TdT Sequence
MENLYFQGTVSQYACQRRTTMENHNQIFTDAFAILAENAEFNESEGPSLAFRRAASLLKSLPHAISSSKDLEGLPCLGDQTKAVIEDILEYGQCSKVQDVLCDDRYQTIKLFTSVFGVGLKTAEKWYRKGFHSLEEVQADKAIQFTKMQKAGFLYYDDISAAVCKAEADAIGQIVEETVRKIAPDAIVTLTGGFRRGKEIGHDVDFLITTPEMGKEQLLPKVIDLLEKKGLLLYYDLVESTFDKTRLPCRKFEAMDHFQKCFAIIKLKKELAAGRVQKDWKAIRVDFVMPPIDNFAFALLGWTGSRQFERDLRRFARHERKMLLDRHALYDKTKKIFLPAKTEEDIFAHLGLDYIPPWQRNA

SEQ ID NO: 607 - protein, 362 aa, Artificial Sequence
  Modified TdT Sequence
MENLYFQGTVSQYACQRRTTMENHNQIFTDAFAILAENAEFNESEGPCLAFRRAASLLKSLPHAISSSKDLEGLPCLGDQTKAVIEDILEYGQCSKVQDVLCDDRYQTIKLFTSVFGVGLKTAEKWYRKGFHSLEDVQANKAIHFTKMQKAGFLYYDDISAAVCKAEADAIGQIVEETVRLIAPDAIVTLTGGFRRGKECGHDVDFLITTPEMGKEQLLPKVINLWEKKGLLLYYDLVESTFDKTRLPCRKFEAMDNFQKCFAIIKLKKELAAGRVQKDWKAIRVDFVMPPVDNFAFALLGWTGSRQFERDLRRFARHERKMLLDRHALYDKTKKIFLPAKTEEDIFAHLGLDYIPPWQRNA

SEQ ID NO: 608 - protein, 362 aa, Artificial Sequence
  Modified TdT Sequence
MENLYFQGTVSQYACQRRTTMENHNQIFTDAFAILAENAEFNENEGPCLAFRRAASLLKSLPHAISSSKDLEGLPCLGDQTKAVIEDILEYGQCSKVQDVLCDDRYQTIKLFTSVFGVGLKTAEKWYRKGFHSLEEVQADKAIHFSKMQKAGFLYYDDISAAVCKAEADAIGRIVEETVRLIAPDAIVTLTGGFRRGKECGHDVDFLITTPEMGKEQLLPKVINLWEKKGLLLYYDLVESTFDKTRLPCRKFEAMDHFQKCFAIIKLKKELAAGRVQKDWKAIRVDFVMPPVDNFAFALLGWTGSRQFERDLRRFARHERKMLLDRHALYDKTKKIFLPAKTEEDIFAHLGLDYIPPWQRNA

SEQ ID NO: 609 - protein, 362 aa, Artificial Sequence
  Modified TdT Sequence
MENLYFQGTVSQYACQRRTTMENHNQIFTDAFAILAENAEFNESEGPALAFRRAASLLKSLPHAISSSKDLEGLPCLGDQTKAVIEEILEYGQCSKVQDVLCDDRYQTIKLFTSVFGVGLKTAEKWYRKGFHSLEEVQADKAIQFTKMQKAGFLYYDDISAAVCKAEADAIGQIVEETVRLMAPDAIVTLTGGFRRGKECGHDVDFLITTPEMGKEQLLPDVINLLEKKGLLLYYDLVESTFDKTRLPCRKFEAMDHFQKCFAIIRLKKELAAGRVQKDWKAIRVDFVMPPIDNFAFALLGWTGSRQFERDLRRFARHERKMLLDRHALFDKTKKIFLPAKTEEDIFAHLGLDYIPPWQRNA

SEQ ID NO: 610 - protein, 362 aa, Artificial Sequence
  Modified TdT Sequence
MENLYFQGTVSQYACQRRTTMENHNQIFTDAFAILAENAEFNESEGPCLAFRRAASLLKSLPHAISSSKDLEGLPCLGDRTKAVMEDILEYGQCSKVQDVLCDDRYQTIKLFTSVFGVGLKTAEKWYRKGFHSLEEVQAEKAIHFTKMQKAGFLYYDDISAAVCKAEADAIGQIVEETVRLIAPDAIVTLTGGFRRGKECGHDVDFLITTPEMGKEQLLPKVINLWEKKGLLLYYDLVESTFDKTRLPCRKFEAMDHFQKCFAIIKLKKELAAGRVQKDWKAIRVDFVMPPVDNFAFALLGWTGSRQFERDLRRFARHERKMLLDRHALYDKTKKIFLPAKTEEDIFAHLGLDYIPPWQRNA

SEQ ID NO: 611 - protein, 362 aa, Artificial Sequence
  Modified TdT Sequence
MENLYFQGTVSQYACQRRTTMENHNQIFTDAFAILAENAEFNESEGPALAFRRAASLLKSLPHAISSSKDLEGLPCLGDQTKAVIEDILEYGQCSKVQDVLCDDRYQTIKLFTSVFGVGLKTAEKWYRKGFHSLEEVQADKAIHFTKMQKAGFLYYDDISAAVCKAEADAIGCIVEETVRLIAPDAIVTLTGGFRRGKEIGHDVDFLITTPEMGKEQLLPKVINLLEKKGLLLYYDLVESTFDKTRLPCRKFEAMDHFQKCFAIIKLKKELAAGRVQKDWKAIRVDFVMPPIDNFAFALLGWTGSRQFERDLRRFARHERKMLLDRHALYDRTKKIFLPAKTEEDIFAHLGLDYIPPWQRNA

SEQ ID NO: 612 - protein, 362 aa, Artificial Sequence
  Modified TdT Sequence
MENLYFQGTVSQYACQRRTTMENHNQIFTDAFAILAENAEFNESEGPALAFRRAASLLKSLPHAISSSKDLEGLPCLGDQTKAVIEDILEYGQCSKVQDVLCDDRYQTIKLFTSVFGVGLKTAEKWYRMGFHSLEEVQADKAIQFTKMQKAGFLYYDDISAAVCKAEADAIGQIVEETVRLIAPDAIVTLTGGFRRGKEIGHDVDFLITTPEMGREQLLPKVIDLLEKKGLLLYYDLVESTFDKTRLPCRKFEAMDHFQKCFAIIKLKKELAAGRVQKDWKAIRVDFVMPPVDNFAFALLGWTGSRQFERDLRRFARHERKMLLDRHALYDKTKKIFLPAKTEEEIFAHLGLDYIPPWQRNA

SEQ ID NO: 613 - protein, 362 aa, Artificial Sequence
  Modified TdT Sequence
MENLYFQGTVSQYACQRRTTMENHNQIFTDAFAILAENAEFNESEGPALAFRRAASLLKSLPHAISSSKDLEGLPCLGDQTKAVIEDILEYGQCSKVQDVLCDDRYQTIKLFTSVFGVGLKTAEKWYRKGFHSLEEVQADKAIHFTKMQKAGFLYYDDISAAVCKAEADAIGQIVEETVRLIAPDAIVTLTGGFRRGKEIGHDVDFLITTPEMGKEQLLPRVINLLEKKGLLLYYDLVESTFDKTRLPCRKFEAMDHFQKCFAIIKLKKELADGRVQKDWKAIRVDFVLPPVDNFAFALLGWTGSRQFERDLRRFARHERKMLLDRHALYDKTKKIFLPAKTEEDIFAHLGLDYIPPWQRNA

SEQ ID NO: 614 - protein, 362 aa, Artificial Sequence
  Modified TdT Sequence
MENLYFQGTVSQYACQRRTTMENHNQIFTDAFAILAENAEFNESEGPALAFLRAASLLKSLPHAISSSKDLEGLPCLGDQTKAVIEDILEYGQCSKVQDVLCDDRYQTIKLFTSVFGVGLKTAEKWYRKGFHSLEEVQADKAIQFTKMQKAGFLYYDDISAAVCKAEADAIGQIVEETVRLIAPDAIVTLTGGFRRGKECGHDVDFLITTPEMGKEQLLPKLINLLEKKGLLLYYDLVESTFDKTRLPCRKFEAMDHFQKCFAIIKLKKELAAGRVQKDWKAIRVDFVMPPVDNFAFALLGWTGSRQFERDLRRFARHERKMLLDRHALYDKTKKIFLPAKTEEDIFAHLGLDYIPPWQRNA

SEQ ID NO: 615 - protein, 362 aa, Artificial Sequence
  Modified TdT Sequence
MENLYFQGTVSQYACQRRTTMENHNQIFTDAFAILAENAEFNESEGPCLAFRRAASVLKSLPHAISSSKDLEGLPCLGDQTKCVIEDILEYGQCSKVQDVLCDDRYQTIKLFTSVFGVGLKTAEKWYRKGFHSLEEVQADKAIHFTKMQKAGFLYYDDISAAVCKAEADAIGQIVEETVRLIAPDAIVTLTGGFRRGKEIGHDVDFLITTPEMGKEQLLPKVINLWEKKGLLLYYDLVESTFDKTRLPCRKFEAMDHFQKCFAIIKLKKELAAGRVQKDWKAIRVDFVMPPVDNFAFALLGWTGSRQFERDLRRFARHERKMLLDRHALYDKTKKIFLPAKTEEDIFAHLGLDYIPPWQRNA

SEQ ID NO: 616 - protein, 362 aa, Artificial Sequence
  Modified TdT Sequence
MENLYFQGTVSQYACQRRTTMENHNQIFTDAFAILAENAEFNESEGPCLAFRRAASVLKSLPHAISSSKDLEGLPCLGDQTKAVIEDILEYGQCSKVQDVLCDDRYQTIKLFTSVFGVGLKTAEKWYRMGFHSLEEVQADKAIHFTKMQKAGFLYYDDISAAVCKAEADAIGQIVEETVRLIAPDAIVTLTGGFRRGKECGHDVDFLITTPEMGKEQLLPKVINLWEKKGLLLYYDLVESTFDKTRLPCRKFEAMDHFQKCFAIIKLKKELAAGRVQKDWKAIRVDFVMPPVDNFAFALLGWTGSRQFERDLRRFARHERRMLLDRHALYDKTKKIFLPAKTEEDIFAHLGLDYIPPWQRNA

SEQ ID NO: 617 - protein, 362 aa, Artificial Sequence
  Modified TdT Sequence
MENLYFQGTVSQYACQRRTTMENHNQIFTDAFAILAENAEFNESEGPCLAFRRAASLLKSLPHAISSSKDLEGLPCLGDQTKCVIEDILEYGQCSKVQDVLCDDRYQTIKLFTSVFGVGLKTAEKWYRKGFHSLEEVQADKAIHFTKMQKAGFLYYDDISAAVCKAEADAIGQIVEETVRLIAPDAIVTLTGGFRRGKECGHDVDFLITTPEMGKEQLLPRIINLWEKKGLLLYYDLVESTFDKTRLPCRKFEAMDHFQKCFAIIKLKKELAAGRVQKDWKAIRVDFVMPPVDNFAFALLGWTGSRQFERDLRRFARHERKMLLDRHALYDKTKKIFLPAKTEEDIFAHLGLDYIPPWQRNA

SEQ ID NO: 618 - protein, 362 aa, Artificial Sequence
  Modified TdT Sequence
MENLYFQGTVSQYACQRRTTMENHNQIFTDAFAILAENAEFNESEGPALAFRRAASLLKSLPHAISSSKDLEGLPCLGDQTKAVIEDILEYGQCSKVQDVLCDDRYQTIKLFTSVFGVGLKTAEKWYRKGFHSLEEVQADKAIHFTKMQRAGFLYYDDISAAVCKAEADAIGQIVEETVRLIAPDAIVTLTGGFRRGKEIGHDVDFLITTPEAGKEQLLPKVINLLEKKGLLLYYDLVESTFDKTRLPCRKFEAMDHFQKCFAIIKLKKELAAGRVQKDWKAIRVDFVMPPVDNFAFALLGWTGSRQFERDLRRFARHERKMLLDRHALYDKTKKIFLPAKTEEDIFAHLGLDYIPPWQRNA

SEQ ID NO: 619 - protein, 362 aa, Artificial Sequence
  Modified TdT Sequence
MENLYFQGTVSQYACQRRTTMENHNQIFTDAFAILAENAEFNESEGPALAFRRAASLLKSLPHAISSSKDLEGLPCLGDQTKAVIEDILEYGQCSKVQDVLCDDRYQTIKLFTSVFGVGLKTAEKWYRKGFHSLEEVQADKAIQFTKMQKAGFLYYDDISAAVCKAEADAIGQIVEETVRKIAPDALVTLTGGFRRGKECGHDVDFLITTPEMGKEQLLPDVINLLEKKGLLLYYDLVESTFDKTRLPCRKFEAMDHFQKCFAIIKLKKELAAGRVQKDWKAIRVDFVMPPADNFAFALLGWTGSRQFERDLRRFARHERKMLLDRHALYDKTKKIFLPAKTEEDIFAHLGLDYIPPWQRNA

SEQ ID NO: 620 - protein, 362 aa, Artificial Sequence
  Modified TdT Sequence
MENLYFQGTVSQYACQRRTTMENHNQIFTDAFAILAENAEFNESEGPALAFRRAASLLKSLPHAISSSKDLEGLPCLGDQTKAVIEDILEYGQCSKVQDVLCDDRYQTIKLFTSVFGVGLKTAEKWYRKGFHSLEEVQADKAIQFTKMQKAGFLYYDDISAAVCKAEADAIGQIVEETVRLIAPDALVTLTGGFRRAKECGHDVDFLITTPEMGKEQLLPDVINLLEKKGLLLYYDLVESTFDKTRLPCRKFEAMDHFQKCFAIIKLKKELAAGRVQKDWKAIRVDFVMPPIDNFAFALLGWTGSRQFERDLRRFARHERKMLLDRHALYDKTKKIFLPAKTEEDIFAHLGLEYIPPWQRNA

SEQ ID NO: 621 - protein, 362 aa, Artificial Sequence
  Modified TdT Sequence
MENLYFQGTVSQYACQRRTTMENHNQIFTDAFAILAENAEFNENEGPCLAFRRAASLLKSLPHAISSSKDLEGLPCLGDQTKAVIEDILEYGQCSKVQDVLCDDRYQTIKLFTSVFGVGLKTAEKWYRKGFHSLEEVQADKAIHFTKMQKAGFLYYDDISAAVCKAEADAIGQIVEETVRLIAPDAIVTLTGGFRRGKECGHDVDFLITTPEAGKEQLLPRVINLLEKKGLLLYYDLVESTFDKTRLPCRKFEAMDHFQKCFAIIKLKKELAAGRVQKDWKAIRVDFVMPPVDNFAFALLGWTGSRQFERDLRRFARHERKMLLDRHALYDKTKKIFLPAKTEEDIFAHLGLDYIPPWQRNA

SEQ ID NO: 622 - protein, 362 aa, Artificial Sequence
  Modified TdT Sequence
MENLYFQGTVSQYACQRRTTMENHNQVFTDAFAILAENAEFNESEGPCLAFRRAASLLKSLPHAISSSKDLEGLPCLGDQTKAVIEDILEYGQCSKVQDVLCDDRYQTIKLFTSVFGVGLKTAEKWYRMGFHSLEEVQADKAIHFTKMQRAGFLYYDDISAAVCKAEADAIGQIVEETVRLIAPDAIVTLTGGFRRGKEIGHDVDFLITTPEMGKEQLLPRVINLLEKKGLLLYYDLVESTFDKTRLPCRKFEAMDHFQKCFAIIKLKKELAAGRVQKDWKAIRVDFVMPPVDNFAFALLGWTGSRQFERDLRRFARHERKMLLDRHALYDKTKKIFLPAKTEEDIFAHLGLDYIPPWQRNA

SEQ ID NO: 623 - protein, 362 aa, Artificial Sequence
  Modified TdT Sequence
MENLYFQGTVSQYACQRRTTMENHNQIFTDAFAILAENAEFNESEGPALAFRRAASLLKSLPHAISSSKDLEGLPCLGDQTKAVIEDILEYGQCSKVQDVLCDDRYQTIKLFTSVFGVGLKTAEKWYRKGFHSLEEVQADKAIQFTKMQKAGFLYYDDISAAVCKAEADAIGQIVEETVHLIAPDAIVTLTGGFRRGKSCGHDVDFLITTAEMGKEQLLPDVINLLEKKGLLLYYDLVESTFDKTRLPSRKFEAMDHFQKCFAIIKLKKELAAGRVQKDWKAIRVDFVMPPIDNFAFALLGWTGSRQFERDLRRFARHERKMLLDRHALYDKTKKIFLPAKTEEDIFAHLGLDYIPPWQRNA

SEQ ID NO: 624 - protein, 362 aa, Artificial Sequence
  Modified TdT Sequence
MENLYFQGTVSQYACQRRTTMENHNQIFTDAFAILAENAEFNESEGPCLAFRRAASLLKSLPHAISSSKDLEGLPCLGDQTKAVIEDILEYGQCSKVQDVLCDDRYQTIKLFTSVFGVGLKTAEKWYRKGFHSLEEVQADKAIHFTKMQKAGFLYYDDITAAVCKAEADAIGQIVEETVHLIAPDAIVTLTGGFRRGKEIGHDVDFLITTPEMGREQLLPRVINLLEKKGLLLYYDLVESTFDKTRLPCRKFEAMDHFQKCFAIIKLKKELAAGRVQKDWKAIRVDFVMPPIDNFAFALLGWTGSRQFERDLRRFARHERKMLLDRHALYDKTKKIFLPAKTEEDIFAHLGLDYIPPWQRNA

SEQ ID NO: 625 - protein, 362 aa, Artificial Sequence
  Modified TdT Sequence
MENLYFQGTVSQYACQRRTTMENHNQIFTDAFAILAENAEFNENEGPCLAFRRAASLLKSLPHAISSSKDLEGLPCLGDQTKCVIEDILECGQCSKVQDVLCDDRYQTIKLFTSVFGVGLKTAEKWYRKGFHSLEEVQADKAIHFTKMQKAGFLYYDDISAAVCKAEADAIGQIVEETVRLIAPDAIVTLTGGFRRGKECGHDVDFLITTPEMGKEQLLPKVINLWEKKGLLLYYDLVESTFDKTRLPCRKFEAMDHFQKCFAIIKLKKELAAGRVQKDWKAIRVDFVMPPVDNFAFALLGWTGSRQFERDLRRFARHERKMLLDRHALYDKTKKIFLPAKTEEDIFAHLGLDYIPPWQRNA

SEQ ID NO: 626 - protein, 362 aa, Artificial Sequence
  Modified TdT Sequence
MENLYFQGTVSQYACQRRTTMENNNQIFTDAFAILAENAEFNESEGPCLAFRRAASLLKSLPHAISSSKDLEGLPCLGDQTKAVIEDILEYGQCSKVQDVLCDDRYQTIKLFTSVFGVGLKTAEKWYRKGFHSLEEVQADKAIHFTKMQKAGFLYYDDISAAVCKAEADAIGQIVEETVHLIAPDAIVTLTGGFRRGKEIGHDVDFLITTPEMGKEQLLPRVINLLEKKGLLLYYDLVESTFDKTRLPCRKFEAMDHFQKCFAIIKLKKELAAGRVQKDWKAIRVDFVLPPVDNFAFALLGWTGSRQFERDLRRFARHERKMLLDRHALYDKTKKIFLPAKTEEDIFAHLGLDYIPPWQRNA

SEQ ID NO: 627 - protein, 362 aa, Artificial Sequence
  Modified TdT Sequence
MENLYFQGTVSQYACQRRTTMENHNQIFTDAFAILAENAEFNESEGPCLAFRRAASLLKSLPHAISSSKDLEGLPCLGDQTKAVIEDILEYGQCSKVQDVLCDDRYQTIKLFTSVFGVGLKTAEKWYRKGFHSLEEVQADNAIHFTKMQKAGFLYYDDISAAVCKAEADAIGQIVEETVRLIAPDAIVTLTGGFRRGKECGHDVDFLITTPEMGKEQLLPKVIDLWEKKGLLLYYDLVESTFDKTRLPCRKFEAMDHFQKCFAIIKLKAELAAGRVQKDWKAIRVDFVMPPVDNFAFALLGWTGSRQFERDLRRFARHERKMLLDRHALYDKTKKIFLPAKTEEDIFAHLGLDYIPPWQRNA

SEQ ID NO: 628 - protein, 362 aa, Artificial Sequence
  Modified TdT Sequence
MENLYFQGTVSQYACQRRTTMENHNQIFTDAFAILAENAEFNESEGPCLAFRRAASLLKSLPHAISRSKDLEGLPCLGDQSKAVIEDILEYGQCSKVQDVLCDDRYQTIKLFTSVFGVGLKTAEKWYRKGFHSLEEVQADKAIHFTKMQKAGFLYYDDISAAVCKAEADAIGQIVEETVRLIAPDAIVTLTGGFRRGKECGHDVDFLITTPEMGKEQLLPKVIDLWEKKGLLLYYDLVESTFDKTRLPCRKFEAMDHFQKCFAIIKLKKELAAGRVQKDWKAIRVDFVMPPVDNFAFALLGWTGSRQFERDLRRFARHERKMLLDRHALYDKTKKIFLPAKTEEDIFAHLGLDYIPPWQRNA

SEQ ID NO: 629 - protein, 362 aa, Artificial Sequence
  Modified TdT Sequence
MENLYFQGTVSQYACQRRTTMENHNQIFTDAFAILAENAEFNESEGPALAFRRAASLLKSLPHAISSSKDLEGLPCLGDQTKAVIEEILEYGQCSKVQDVLCDDRYKTIKLFTSVFGVGLKTAEKWYRKGFHSLEEVQADKAIQFTKMQKAGFLYYDDISAAVCKAEADAIGQIVEETVRLIAPDAIVTLTGGFRRGKECGHDVDFLITTPEMGKEQLLPDVINLLEKKGLLLYYDLIESTFDKTRLPCRKFEAMDHFQKCFAIIKLKKELAAGRVQKDWKAIRVDFVMPPIDNFAFALLGWTGSRQFERDLRRFARHERKMLLDRHALYDKTKKIFLPAKTEEDIFAHLGLDYIPPWQRNA

SEQ ID NO: 630 - protein, 362 aa, Artificial Sequence
  Modified TdT Sequence
MENLYFQGTVSQYACQRRTTMENHNQIFTDAFAILAENAEFNESEGPCLAFRRAASLLKSLPHAISSSKDLEGLPCLGDQTKCVIEDILEYGQCSKVQDVLCDDRYQTIKLFTSVFGVGLKTAEKWYRKGFHSLEEVQAEKAIHFTKMQKAGFLYYDDISAAVCKAEADAIGRIVEETVRLIAPDAIVTLTGGFRRGKECGHDVDFLITTPEMGKEQLLPKVINLWEKKGLLLYYDLVESTFDKTRLPCRKFEAMDHFQKCFAIIKLKKELAAGRVQKDWKAIRVDFVMPPVDNFAFALLGWTGSRQFERDLRRFARHERKMLLDRHALYDKTKKIFLPAKTEEDIFAHLGLDYIPPWQRNA

SEQ ID NO: 631 - protein, 362 aa, Artificial Sequence
  Modified TdT Sequence
MENLYFQGTVSQYACQRRTTMENHNQIFTDAFAILAENAEFNESEGPCLAFLRAASLLKSLPHAISSSKDLEGLPCLGDQTKAVIEDILEYGQCSKVQDVLCDDRYQTIKLFTSVFGVGLKTAEKWYRKGFHSLEEVQADKAIHFTKMQKAGFLYYDDISAAVCKAEADAIGQIVEETVRLIAPDAIVTLTGGFRRGKECGHDVDFLITTPEMGKEQLLPKVINLWEKKGLLLYYDLVESTFDKSRLPCRKFEAMDHFQKCFAIIKLKKELADGRVQKDWKAIRVDFVMPPVDNFAFALLGWTGSRQFERDLRRFARHERKMLLDRHALYDKTKKIFLPAKTEEDIFAHLGLDYIPPWQRNA

SEQ ID NO: 632 - protein, 362 aa, Artificial Sequence
  Modified TdT Sequence
MENLYFQGTVSQYACQRRTTMENHNQIFTDAFAILAENAEFNESEGPCLAFRRAASLLKSLPHAISSSKDLEGLPCLGDQTKAVIEDILEYGQCSKVQDVLCDDRYQTIKLFTSVFGVGLKTAEKWYRKGFHSLEEVQADKAIHFTKMQKAGFLYYDDISAAVCKAEADAIGQIVEETVRLIAPDAIVTLTGGFRRGKEIGHDVDFLITTPEMGKEQLLPKVINLLEKKGLLLYYDLVESTFDKTRLPCRKFEAMDHFQKCFAIIKLKKELAAGRVQKDWKAIRVDFVMPPVDNFAFALLGWTGSRQFERDLRRFARHERKMLLDRHALYDRTKKIFLPAKSEEDIFAHLGLDYIPPWQRNA

SEQ ID NO: 633 - protein, 362 aa, Artificial Sequence
  Modified TdT Sequence
MENLYFQGTVSQYACQRRTTMENHNKIFTDAFAILAENAEFNESEGPCLAFRRAASLLKSLPHAISSSKDLEGLPCLGDQTKAVIEDILEYGQCSKVQDVLCDDRYQTIKLFTSVFGVGLKTAEKWYRKGFHSLEEVQADKAIHFTKMQKAGFLYYDDISAAVCKAEADAIGQIVEETVRLIAPDAIVTLTGGFRRGKEIGHDVDFLITTPEAGKEQLLPRVINLLEKKGLLLYYDLVESTFDKTRLPCRKFEAMDHFQKCFAIIKLKKELAAGRVQKDWKAIRVDFVMPPVDNFAFALLGWTGSRQFERDLRRFARHERKMLLDRHALYDKTKKIFLPAKTEEEIFAHLGLDYIPPWQRNA

SEQ ID NO: 634 - protein, 362 aa, Artificial Sequence
  Modified TdT Sequence
MENLYFQGTVSQYACQRRTTMENHNQIFTDAFAILAENAEFNESEGPALAFRRAASLLKSLPHAISSSKDLEGLPCLGDQTKAVIEDIFEYGQCSKVQDVLCDDRYQTIKLFTSVFGVGLKTAEKWYRKGFHSLEEVQADKAIHFTKMQKAGFLYYDDISAAVCKAEADAIGQIVEETVRLIAPDAIVTLTGGFRRGKECGHDVDFLITTPEMGKEQLLPRVINLLEKKGLLLYYDLVESTFDKTRLPCRKFEAMDHFQKCFAIIKLKKELAAGRVQKDWKAIRVDFVMPPVDNFAFALLGWTGSRQFERDLRRFARHERKMLLDRHALYDKTKKIFLPAKTEEDIFAHLGLDYIDPWQRNA

SEQ ID NO: 635 - protein, 362 aa, Artificial Sequence
  Modified TdT Sequence
MENLYFQGTVSQYACQRRTTMENHNQIFTDAFAILAENAEFNESEGPCLAFRRAASLLKSLPHAISSSKDLEGLPCLGDQTKAVIEDILEYGQCSKVQDVLCDDRYQTIKLFTSVFGVGLKTAEKWYRKGFHSLEEVQADKAIQFTKMQKAGFLYYDDISAAVCKAEADAIGQIVEETVRLITPDAIVTLTGGFRRGKECGHDVDFLITTPEMGKEQLLPRVINLWEKKGLLLYYDLVESTFDKTRLPCRKFEAMDHFQKCFAIIKLKKELAAGRVQKDWKAIRVDFVMPPVDNFAFALLGWTGSRQFERDLRRFARHERKMLLDRHALYDKTKKIFLPAKTEEDIFAHLGLDYIPPWQRNA

SEQ ID NO: 636 - protein, 362 aa, Artificial Sequence
  Modified TdT Sequence
MENLYFQGTVSQYACQRRTTMENHNQIFTDAFAILAENAEFNESEGPCLAFRRAASLLKSLPHAISSSKDLEGLPCLGDQTKAVIEDILEYGQCSKVQDVLCDDRYQTIKLFTSVFGVGLKTAEKWYRMGFHSLEEVQADKAIHFTKMQKAGFLYYDDISAAVCKAEADAIGQIVEETVRLIAPDAIVTLTGGFRRGKEIGHDVDFLITTPEMGKEQLLPKVIDLLEKKGLLLYYDLVESTFDKTRLPCRKFEAMDHFQKCFAIIKLKKELAAGRVQKDWKAIRVDFVMPPVDNFAFALLGWTGSRQFERDLRRFARHERKMLLDRHALYDKTKKIFLPAKTEEDIFAHLGLDYIPPWQRNA

SEQ ID NO: 637 - protein, 362 aa, Artificial Sequence
  Modified TdT Sequence
MENLYFQGTVSQYACQRRTTMENHNQIFTDAFAILAENAEFNESEGPAVAFRRAASLLKSLPHAISSSKDLEGLPCLGDQTKAVIEDILEYGQCSKVQDVLCDDRYQTIKLFTSVFGVGLKTAEKWYRKGFHSLEEVQADKAIQFTKMQKAGFLYYDDISAAVCKAEADAIGQIVEETVRLIAPDAIVTLTGGFRRGKEIGHDVDFLITTPEMGKEQLLPKVINLLEKKGLLLYYDLIESTFDKTRLPCRKFEAMDHFQKCFAIIKLKKELAAGRVQKDWKAIRVDFVMPPIDNFAFALLGWTGSRQFERDLRRFARHERKMLLDRHALYDKTKKIFLPAKTEEDIFAHLGLDYIPPWQRNA

SEQ ID NO: 638 - protein, 362 aa, Artificial Sequence
  Modified TdT Sequence
MENLYFQGTVSQYACQRRTTMENRNQIFTDAFAILAENAEFNESEGPALAFRRAASLLKSLPHAISSSKDLEGLPCLGDQTKAVIEDILEYGQCSKVQDVLCDDRYQTIKLFTSVFGVGLKTAEKWYRKGFHSLEEVQADKAIQFTKMQKAGFLYYDDISAAVCKAEADAIGQIVEETVRLIAPDAIVTLTGGFRRGKECGHDVDFLITTPEQGKEQLLPDVINLLEKKGLLLYYDLVESTFDKTRLPCRKFEAMDHFQKCFAIIKLKKERAAGRVQKDWKAIRVDFVMPPIDNFAFALLGWTGSRQFERDLRRFARHERKMLLDRHALYDKTKKIFLPAKTEEDIFAHLGLDYIPPWQRNA

SEQ ID NO: 639 - protein, 362 aa, Artificial Sequence
  Modified TdT Sequence
MENLYFQGTVSQYACQRRTTMENHNQIFTDAFAILAENAEFNESEGPALAFRRAASLLKSLPHAISSSKDLEGLPCLGDQTKAVIEDILEYGQCSKVQDVLCDDRYQTIKLFTSVFGVGLKTAEKWYRKGFHSLEEVQADKAIQFTKMQKAGFLYYDDISAAVCKAEADAIGQVVEETVRLIAPDAIVTLTGGFRRGKEIGHDVDFLITTPEMGKEQLLPKVINLLEKKGLLLYYELVESTFDKARLPCRKFEAMDHFQKCFAIIKLKKELAAGRVQKDWKAIRVDFVMPPVDNFAFALLGWTGSRQFERDLRRFARHERKMLLDRHALYDKTKKIFLPAKTEEDIFAHLGLDYIPPWQRNA

SEQ ID NO: 640 - protein, 362 aa, Artificial Sequence
  Modified TdT Sequence
MENLYFQGTVSQYACQRRTTMENHNKIFTDAFAILAENAEFNESEGPCLAFRRAASLLKSLPHAISSSKDLEGLPCLGDQTKAVIEDILEYGQCSKVQDVLCDDRYQTIKLFTSVFGVGLKTAEKWYRKGFHSLEEVQADKAIHFTKMQKAGFLYYDDISAAVCKAEADAIGQIVEETVRLIAPDAIVTLTGGFRRGKEIGHDVDFLITTPEMGKEQLLPRVINLLEKKGLLLFYDLVESTFDKTRLPCRKFEAMDHFQKCFAIIKLKKELAAGRVQKDWKAIRVDFVMPPVDNFAFALLGWTGSRQFERDLRRFARHERKMLLDRHALYDRTKKIFLPAKTEEDIFAHLGLDYIPPWQRNA

SEQ ID NO: 641 - protein, 362 aa, Artificial Sequence
  Modified TdT Sequence
MENLYFQGTVSQYACQRRTTLENHNQIFTDAFAILAENAEFNESEGPALAFRRAASLLKSLPHAISSSKDLEGLPCLGDQTKAVIEDILEYGQCSKVQDVLCDDRYQTIKLFTSVFGVGLKTAEKWYRKGFHSLEEVQADKAIQFTKMQKAGFLYYDDISAAVCKAEADAIGQIVEETVHLIAPDAIVTLTGGFRRGKECGHDVDFLITTPEMGKEQLLPDVINLLEKKGLLLYYDLVESTFDKTRLPCRKFEAMDHFQKCFAIIKLKKELAAGCVQKDWKAIRVDFVMPPIDNFAFALLGWTGSRQFERDLRRFARHERKMLLDRHALYDKTKKIFLPAKTEEDIFAHLGLDYIPPWQRNA

SEQ ID NO: 642 - protein, 362 aa, Artificial Sequence
  Modified TdT Sequence
MENLYFQGTVSQYACQRRTTMENHNQIFTDAFAILAENAEFNESEGPCLAFRRAASLLKSLPHAISSSKDLQGLPCLGDQTKAVIEDIIEYGQCSKVQDVLCDDRYQTIKLFTSVFGVGLKTAEKWYRKGFHSLEEVQADKAIHFTKMQKAGFLYYDDISAAVCKAEADAIGQIVEETVRLIAPDAIVTLTGGFRRGKECGHDVDFLITTPEMGKEQLLPKVVNLWEKKGLLLYYDLVESTFDKTRLPCRKFEAMDHFQKCFAIIKLKKELAAGRVQKDWKAIRVDFVMPPVDNFAFALLGWTGSRQFERDLRRFARHERKMLLDRHALYDKTKKIFLPAKTEEDIFAHLGLDYIPPWQRNA

SEQ ID NO: 643 - protein, 362 aa, Artificial Sequence
  Modified TdT Sequence
MENLYFQGTVSQYACQRRTTMENHNQIFTDAFAILAENAEFNESEGPALAFRRAASLLKSLPHAISSSKDLEGLPCLGDQTKAVIEDILEYGQCSKVQDVLCDDRYQTIKLFTSVFGVGLKTAEKWYRKGFHSLEEVQADKAIQFTKMQKAGFLYYDDISAAVCKAEADAIGQIVEETVRLIAPDAIVTLTGGFRRGKECGHDVDFLITTPEMGKEQLLPDVINLLEKKGLLLYYDLIESTFDKTRLPCRKFEAMDHFQKCFAIIKLKKERAAGRVQKDWKAIRVDFVMPPADNFAFALLGWTGSRQFERDLRRFARHERKMLLDRHALYDKTKKIFLPAKTEEDIFAHLGLDYIPPWQRNA

SEQ ID NO: 644 - protein, 362 aa, Artificial Sequence
  Modified TdT Sequence
MENLYFQGTVSQYACQRRTTMENHNQIFTDAFAILAENAEFNENEGPALAFRRAASLLKSLPHAISSSKDLEGLPCLGDQTKAVIEDILEYGQCSKVQDVLCDDRYQTIKLFTSVFGVGLKTAEKWYRMGFHSLEEVQADKAIQFTKMQKAGFLYYDDISAAVCKAEADAIGQIVEETVRLIAPDAIVTLTGGFRRGKEIGHDVDFLITTPEMGKEQLLPKVINLLEKKGLLLFYDLVESTFDKTRLPCRKFEAMDHFQKCFAIIKLKKERAAGRVQKDWKAIRVDFVMPPVDNFAFALLGWTGSRQFERDLRRFARHERKMLLDRHALYDKTKKIFLPAKTEEDIFAHLGLDYIPPWQRNA

SEQ ID NO: 645 - protein, 362 aa, Artificial Sequence
  Modified TdT Sequence
MENLYFQGTVSQYACQRRTTMENHNQIFTDAFAILAENAEFNESEGPCLAFLRAASLLKSLPHAISSSKDLEGLPCLGDQTKAVIEDILEYGQCSKVQDVLCDDRYQTIKLFTSVFGVGLKTAEKWYRKGFHSLEEVQADKAIHFTKMQKAGFLYYDDISAAVCKAEADAIGQIVEETVRLIAPDAIVTLTGGFRRGKEIGHDVDFLITTPEMGKEQLLPRVINLLEKKGLLLYYDLVESTFDKTRLPCRKFEAMDHFQKCFAIIKLKKELADGRVQKDWKAIRVDFVMPPVDNFAFALLGWTGSRQFERDLRRFARHERKMLLDRHALYDKTKKIFLPAKSEEDIFAHLGLDYIPPWQRNA

SEQ ID NO: 646 - protein, 362 aa, Artificial Sequence
  Modified TdT Sequence
MENLYFQGTVSQYACQRRTTMENHNQIFTDAFAILAENAEFNESEGPALAFRRAASLLKSLPHAISSSKDLEGLPCLGDQTKAVIEDILEYGQCSKVQDVLCDDRYQTIKLFTSVFGVGLKTAEKWYRMGFHSLEEVQADKAIQFTKMQKAGFLYYDDISAAVCKAEADAIGQVVEETVRLIAPDAIVTLTGGFRRGKEIGHDVDFLITTPEAGKEQLLPKVINLLEKKGLLLYYDLVESTFDKTRLPCRKFEAMDHFQKCFAIIKLKKELAAGRVQKDWKAIRVDFVMPPVDNFAFALLGWTGSRQFERDLRRFARHERKMLLDRHALYDKTKKIFLPAKTEEDIFAHLGLDYIPPWQRNA

SEQ ID NO: 647 - protein, 362 aa, Artificial Sequence
  Modified TdT Sequence
MENLYFQGTVSQYACQRRTTMENHNQIFTDAFAILAENAEFNESEGPCLAFRRAASLLKSLPHAISSSKDLEGLPCLGDQSKAVIEDILEYGQCSKVQDVLCDDRYQTIKLFTSVFGVGLKTAEKWYRKGFHSLEEVQADKAIHFTKMQKAGFLYYDDISAAVCKAEADAIGQIVEETVRLIAPDAIVTLTGGFRRGKECGHDVDFLITTPGMGKEQLLPKVIRLWEKKGLLLYYDLVESTFDKTRLPCRKFEAMDHFQKCFAIIKLKKELAAGRVQKDWKAIRVDFVMPPVDNFAFALLGWTGSRQFERDLRRFARHERKMLLDRHALYDKTKKIFLPAKTEEDIFAHLGLDYIPPWQRNA

SEQ ID NO: 648 - protein, 362 aa, Artificial Sequence
  Modified TdT Sequence
MENLYFQGTVSQYACQRRTTMENHNQIFTDAFAILAENAEFNESEGPALAFRRAASLLKSLPHAISSSKDLEGLPCLGDQTKAVIEDILEYGQCSKVQDVLCDDRYQTIKLFTSVFGVGLKTAEKWYRKGFHSLEEVQADKAIHFTKMQKAGFLYYDDISAAVCKAEADAIGQIVEETVRLIAPDAIVTLTGGFRRGKECGHDVDFLITTPEMGKEQLLPDVINLLEKKGLLLYYDLIESTFDKTRLPCRKFEAMDHFQKCFAIIKLEKELAAGRVQKDWKAIRVDFVMPPIDNFAFALLGWTGSRQFERDLRRFARHERKMLLDRHALYDKTKKIFLPAKTEEDIFAHLGLDYIPPWQRNA

SEQ ID NO: 649 - protein, 362 aa, Artificial Sequence
  Modified TdT Sequence
MENLYFQGTVSQYACQRRTTMENHNQIFTDAFAILAENAEFNESEGPALAFRRAASLLKSLPHTISSSKDLEGLPCLGDQTKAVIEDILEYGQCSKVQDVLCDDRYQTIKLFTSVFGVGLKTAEKWYRKGFHSLEEVQADKAIQFTKMQKAGFLYYDDISAAVCKAEADAIGQIVEETVRLIAPDALVTLTGGFRRGKECGHDVDFLITTPEMGKEQLLPDVINLLEKKGLLLYYDLVESTFDKTRLPSRKFEAMDHFQKCFAIIKLKKELAAGRVQKDWKAIRVDFVMPPIDNFAFALLGWTGSRQFERDLRRFARHERKMLLDRHALFDKTKKIFLPAKTEEDIFAHLGLDYIPPWQRNA

SEQ ID NO: 650 - protein, 362 aa, Artificial Sequence
  Modified TdT Sequence
MENLYFQGTVSQYACQRRTTMENHNQIFTDAFAILAENAEFNESEGPCLAFRRAASLLKSLPHAISSSKDLEGLPCLGDRSKAVIEDILECGQCSKVQDVLCDDRYQTIKLFTSVFGVGLKTAEKWYRKGFHSLEEVQADKAIHFTKMQKAGFLYYDDISAAVCKAEADAIGQIVEETVRLIAPDAIVTLTGGFRRGKECGHDVDFLITTPEMGKEQLLPKVINLWEKKGLLLYYDLVESTFDKTRLPCRKFEAMDHFQKCFAIIKLKKELAAGRVQKDWKAIRVDFVMPPVDNFAFALLGWTGSRQFERDLRRFARHERKMLLDRHALYDKTKKIFLPAKTEEDIFAHLGLDYIPPWQRNA

SEQ ID NO: 651 - protein, 362 aa, Artificial Sequence
  Modified TdT Sequence
MENLYFQGTVSQYACQRRTTMENHNQIFTDAFAILAENAEFNENEGPALAFRRAASLLKSLPHAISSSKDLEGLPCLGDQTKAVIEDILEYGQCSKVQDVLCDDRYQTIKLFTSVFGVGLKTAEKWYRKGFHTLEEVQADKAIQFTKMQKAGFLYYDDISAAVCKAEADAIGQIVEETVRLIAPDAIVTLTGGFRRGKECGHDVDFLITTPEMGKEQLLPKVINLLEKKGLLLYYDLVESTFDKTRLPCRKFEAMDHFQKCFAIIKLKKELAAGRVQKDWKAIRVDFVMPPVDNFAFALLGWTGSRQFERDLRRFARHERKMLLDRHALYDKTKKIFLPAKTEEDIFAHLGLDYIPPWQRNA

SEQ ID NO: 652 - protein, 362 aa, Artificial Sequence; identical to SEQ ID NO: 352
  Modified TdT Sequence

SEQ ID NO: 653 - protein, 362 aa, Artificial Sequence
  Modified TdT Sequence
MENLYFQGTVSQYACQRRTTMENHNQIFTDAFAILAENAEFNENEGPCLAFRRAASLLKSLPHAISSSKDLEGLPCLGDQSKAVIEDILEYGQCSKVQDVLCDDRYQTIKLFTSVFGVGLKTAEKWYRKGFHSLEEVQADKAIHFTKMQKAGFLYYDDISAAVCKAEADAIGQIVEETVRLIAPDAIVTLTGGFRRGKNCGHDVDFLITTPEMGKEQLLPKVINLWEKKGLLLYYDLVESTFDKTRLPCRKFEAMDHFQKCFAIIKLKKELAAGRVQKDWKAIRVDFVMPPVDNFAFALLGWTGSRQFERDLRRFARHERKMLLDRHALYDKTKKIFLPAKTEEDIFAHLGLDYIPPWQRNA

SEQ ID NO: 654 - protein, 362 aa, Artificial Sequence
  Modified TdT Sequence
MENLYFQGTVSQYACQRRTTMENHNQIFTDAFAILAENAEFNESEGPALAFRRAASLLKSLPHAISSSKDLEGLPCLGDQTKAVIEDILEYGQCSKVQDVLCDDRYQTIKLFTSVFGVGLKTAEKWYRKGFHSLEEVQADKAIQFTKMQKAGFLYYDDISAAVCKAEADAIGQIVEETVRAIAPDALVTLTGGFRRGKSCGHDVDFLITTPEMGKEQLLPKVINLLEKKGLLLYYDLVESTFDKTRLPCRKFEAMDHFQKCFAIIKLKKELAAGRVQKDWKAIRVDFVMPPIDNFAFALLGWTGSRQFERDLRRFARHERKMLLDRHALYDKTKKIFLPAKTEEDIFAHLGLDYIPPWQRNA

SEQ ID NO: 655 - protein, 362 aa, Artificial Sequence
  Modified TdT Sequence
MENLYFQGTVSQYACQRRTTMENHNQIFTDAFAILAENAEFNESEGPALAFRRAASLLKSLPHAISSSKDLEGLPCLGDQTKAVIEDILEYGQCSKVQDVLCDDRYQTIKLFTSVFGVGPKTAEKWYRKGFHSLEEVQADKAIHFTKMQKAGFLYYDDISAAVCKAEADAIGQIVEETVRLIAPDAIVTLTGGFRRGKEIGHDVDFLITTPEMGKEQLLPRVINLLEQKGLLLYYDLVESTFDKTRLPCRKFEAMDHFQKCFAIIKLKKELAAGRVQKDWKAIRVDFVMPPVDNFAFALLGWTGSRQFERDLRRFARHERKMLLDRHALYDKTKKIFLPAKTEEDIFAHLGLDYIPPWQRNA

SEQ ID NO: 656 - protein, 362 aa, Artificial Sequence
  Modified TdT Sequence
MENLYFQGTVSQYACQRRTTMENHNQIFTDAFAILAENAEFNENEGPCLAFRRAASLLKSLPHAISSSKDLEGLPCLGDQTKAVIEDILEYGQCSKVQDVLCDDRYQTIKLFTSVFGVGLKTAEKWYRKGFHSLEEVQADKAIHFTKMQKAGFLYYDDISAAVCKAEADAIGQIVEETVRLIAPDAIVALTGGFRRGKEIGHDVDFLITTPEMGKEQLLPRVINLLEKKGLLLYYDLVESTFDKTRLPCRKFEAMDHFQKCFAIIKLKKELADGRVQKDWKAIRVDFVMPPVDNFAFALLGWTGSRQFERDLRRFARHERKMLLDRHALYDKTKKIFLPAKTEEEIFAHLGLDYIPPWQRNA

SEQ ID NO: 657 - protein, 362 aa, Artificial Sequence
  Modified TdT Sequence
MENLYFQGTVSQYACQRRTTMENHNQIFTDAFAILAENAEFNESEGPALAFRRAASLLKSLPHAISSSKDLEGLPCLGDQTKAVIEDILEYGQCSKVQDVLCDDRYKTIKLFTSVFGVGLKTAEKWYRKGFHSLEEVQADKAIQFTKMQKAGFLYYDDISAAVCKAEADAIGQIVEETVRLIAPDAIVTLTGGFRRGKECGHDVDFIITTPEQGKEQLLPDVINLLEKKGLLLYYDLVESTFDKTRLPCRKFEAMDHFQKCFAIIKLKKELAAGRVQKDWKAIRVDFVMPPIDNFAFALLGWTGSRQFERDLRRFARHERKMLLDRHALYDKTKKIFLPAKTEEDIFAHLGLDYIPPWQRNA

SEQ ID NO: 658 - protein, 362 aa, Artificial Sequence
  Modified TdT Sequence
MENLYFQGTVSQYACQRRTTMENHNQIFTDAFAILAENAEFNESEGPSLAFRRAASLLKSLPHAISSSKDLEGLPCLGDQTKAVIEDILEYGQCSKVQDVLCDDRYKTIKLFTSVFGVGLKTAEKWYRKGFHSLEEVQADKAIQFTKMQKAGFLYYDDISAAVCKAEADAIGQIVEETVRLIAPDAIVTLTGGFRRGKEIGHDVDFLITTPEAGKEQLLPKVINLLEKKGLLLYYDLVESTFDKTRLPCRKFEAMDHFQKCFAIIKLKKELAAGRVQKDWKAIRVDFVMPPVDNFAFALLGWTGSRQFERDLRRFARHERKMLLDRHALYDKTKKIFLPAKTEEDIFAHLGLDYIPPWQRNA

SEQ ID NO: 659 - protein, 362 aa, Artificial Sequence
  Modified TdT Sequence
MENLYFQGTVSQYACQRRTTMENHNQIFTDAFAILAENAEFNESEGPCLAFRRAASLLKSLPHAISSSKDLEGLPCLGDQTKAVIEDILEYGQCSKVQDVLCDDRYQTIKLFTSVFGVGLKTAEKWYRKGFHSLEEVQADKAIHFTKMQKAGFLYYDDITAAVCKAEADAIGQIVEETVRLIAPDAIVTLTGGFRRGKEIGHDVDFLITTPEAGKEQLLPRVIDLLEKKGLLLYYDLVESTFDKTRLPCRKFEAMDHFQKCFAIIKLKKELAAGRVQKDWKAIRVDFVMPPVDNFAFALLGWTGSRQFERDLRRFARHERKMLLDRHALYDKTKKIFLPAKTEEDIFAHLGLDYIPPWQRNA

SEQ ID NO: 660 - protein, 362 aa, Artificial Sequence
  Modified TdT Sequence
MENLYFQGTVSQYACQRRTTMENHNQIFTDAFAILAENAEFNESEGPALAFRRAASLLKSLPHAISSSKDLEGLPCLGDQTKAVIEDILEYGQCSKVQDVLCDDRYQTIKLFTSVFGVGLKTAEKWYRKGFHTLEEVQADKAIQFTKMQKAGFLYYDDISAAVCKAEADAIGQIVEETVRLIAPDAIVTLTGGFRRGKEIGHDVDFLITTPEAGKEQLLPKVINLLEKKGLLLYYDLVESTFDKTRLPCRKFEAMDHFQKCFAIIKLKKELAAGRVQKDWKAIRVDFVMPPVDNFAFALLGWTGSRQFERDLRRFARHERKMLLDRHALYDKTKKIFLPAKTEEDIFAHLGLEYIPPWQRNA

SEQ ID NO: 661 - protein, 362 aa, Artificial Sequence
  Modified TdT Sequence
MENLYFQGTVSQYACQRRTTMENHNQLFTDAFAILAENAEFNESEGPALAFRRAASLLKSLPHAISSSKDLEGLPCLGDQTKAVIEDILEYGQCSKVQDVLCDDRYQTIKLFTSVFGVGLKTAEKWYRKGFHSLEEVQADKAIQFTKMQKAGFLYYDDISAAVCKAEADAIGQIVEETVRLIAPDALVTLTGGFRRGKECGHDVDFLITTPEMGKEQLLPDLINLLEKKGLLLYYDLVESTFDKTRLPCRKFEAMDHFQKCFAIIKLKKELAAGRVQKDWKAIRVDFVMPPIDNFAFALLGWTGSRQFERDLRRFARHERKMLLDRHALYDKTKKIFLPAKTEEDIFAHLGLDYIPPWQRNA

SEQ ID NO: 662 - protein, 362 aa, Artificial Sequence
  Modified TdT Sequence
MENLYFQGTVSQYACQRRTTMENHNQIFTDAFAILAENAEFNENEGPALAFRRAASLLKSLPHAISSSKDLEGLPCLGDQTKAVIEDILEYGQCSKVQDVLCDDRYQTIKLFTSVFGVGLKTAEKWYRMGFHSLEEVQADKAIQFTKMQKAGFLYYDDISAAVCKAEADAIGQIVEETVRLIAPDAIVTLTGGFRRGKEIGHDVDFLITTPEMGKEQLLPKVINLLEKKGLLLYYDLVESTFDKTRLPCRKFEAMDHFQKCFAIIKLKKELADGRVQKDWKAIRVDFVMPPIDNFAFALLGWTGSRQFERDLRRFARHERKMLLDRHALYDKTKKIFLPAKTEEDIFAHLGLDYIPPWQRNA

SEQ ID NO: 663 - protein, 362 aa, Artificial Sequence
  Modified TdT Sequence
MENLYFQGTVSQYACQRRTTMENHNQIFTDAFAILAENAEFNESEGPCLAFRRAASLLKSLPHAISSSKDLEGLPCLGDQTKAVIEDILEYGQCSKVQDVLCDDRYQTIKLFTSVFGVGLKTAEKWYRKGFHSLEEVQADKAIQFTKMQKAGFLYYDDISAAVCKAEADAIGQIVEETVRLIAPDAIVTLTGGFRRGKEIGHDVDFLITTPEMGKEQLLPRVIDLLEKKGLLLYYDLVESTFDKTRLPCRKFEAMDHFQKCFAIIKLKKELAAGRVQKDWKAIRVDFVMPPVDNFAFALLGWTGSRQFERDLRRFARHERKMLLDRHALYDRTKKIFLPAKTEEDIFAHLGLDYIPPWQRNA

SEQ ID NO: 664 - protein, 362 aa, Artificial Sequence
  Modified TdT Sequence
MENLYFQGTVSQYACQRRTTMENHNQIFTDAFAILAENAEFNESEGPALAFRRAASLLKSLPHAISSSKDLEGLPCLGDQTKAVIEDILEYGQCSKVQDVLCDDRYQTIKLFTSVFGVGLKTAEKWYRKGFHSLEEVQADKAIQFTKMQKAGFLYYDDISAAVCKAEADAIGQIVEETVRLIAPDAIVTLTGGFRRGKECGHDVDFLITTPEMGKEQLLPDLINLLEKKGLLLYYHLVESTFDKTRLPCRKFEAMDHFQKCFAIIKLKKELAAGRVQKDWKAIRVDFVMPPIDNFAFALLGWTGSRQFERDLRRFARHERKMLLDRHALFDKTKKIFLPAKTEEDIFAHLGLDYIPPWQRNA

SEQ ID NO: 665 - protein, 362 aa, Artificial Sequence
  Modified TdT Sequence
MENLYFQGTVSQYACQRRTTLENHNQIFTDAFAILAENAEFNESEGPALAFRRAASLLKSLPHAISSSKDLEGLPCLGDQTKAVIEDILEYGQCSKVQDVLCDDRYQTIKLFTSVFGVGLKTAEKWYRKGFHSLEEVQADKAIQFTKMQKAGFLYYDDISAAVCKAEADAIGQIVEETVRLIAPDAIVTLTGGFRRGKECGHDVDFLITTPEKGKEQLLPDVINLLEKKGLLLYYDLVESTFDKTRLPCRKFEAMDHFQKCFAIIKLKKELAAGRVQKDWKAIRVDFVMPPIDNFAFALLGWTGSRQFERDLRRFARHERKMLLDRHALYDKTKKIFLPAKTEEDIFAHLGLEYIPPWQRNA

SEQ ID NO: 666 - protein, 362 aa, Artificial Sequence
  Modified TdT Sequence
MENLYFQGTVSQYACQRRTTMENHNQIFTDAFAILAENAEFNESEGPALAFRRAASLLKSLPHAISSSKDLEGLPCLGDQTKAVIEDILEYGQCSKVQDVLCDDRYQTIKLFTSVFGVGLKTAEKWYRKGFHSLEEVQADRAIQFTKMQKAGFLYYDDISAAVCKAEADAIGQIVEETVRLIAPDALVTLTGGFRRGKECGHDVDFIITTPEMGKEQLLPDVINLLEKKGLLLYYDLVESTFDKTRLPCRKFEAMDHFQKCFAIIKLKKELAAGRVQKDWKAIRVDFVMPPIDNFAFALLGWTGSRQFERDLRRFARHERKMLLDRHALYDKTKKIFLPAKTEEDIFAHLGLDYIPPWQRNA

SEQ ID NO: 667 - protein, 362 aa, Artificial Sequence
  Modified TdT Sequence
MENLYFQGTVSQYACQRRTTMENHNQIFTDAFAILAENAEFNESEGPALAFRRAASLLKSLPHAISSSKDLEGLPCLGDQTKAVIEDILEYGQCSKVQDVLCDDRYQTIKLFTSVFGVGLKTAEKWYRKGFHSLEEVQADKAIQFTKMQKAGFLYYDDISAAVCKAEADAIGQIVEETVRLIAPDALVTLTGGFRRGKECGHDVDFLITTPEMGKEQLLPDVINLLEKKGLLLYYDLIESTFDKTRLPCRRFEAMDHFQKCFAIIKLKKELAAGRVQKDWKAIRVDFVMPPIDNFAFALLGWTGSRQFERDLRRFARHERKMLLDRHALYDKTKKIFLPAKTEEDIFAHLGLDYIPPWQRNA

SEQ ID NO: 668 - protein, 362 aa, Artificial Sequence
  Modified TdT Sequence
MENLYFQGTVSQYACQRRTTMENHNQIFTDAFAILAENAEFNESEGPCLAFRRAASLLKSLPHAISSSKDLEGLPCLGDQTKAVIEDILEYGQCSKVQDVLCDDRYQTIKLFTSVFGVGLKTAEKWYRKGFHSLEEVQADKAIHFTKMQKAGFLYYDDISAAVCKAEADAIGQIVEETVRLIAPDAIVTLTGGFRRGKECGHDVDFLITTPEMGKEQLLPKVVNLWEKKGLLLYYDLVESTFDKTRLPCRKFEAMDHFQKCFAIIKLKKELAAGRVQKDWKAIRVDFVMPPVDCFAFALLGWTGSRQFERDLRRFARHERKMLLDRHALYDRTKKIFLPAKTEEDIFAHLGLDYIPPWQRNA

SEQ ID NO: 669 - protein, 362 aa, Artificial Sequence
  Modified TdT Sequence
MENLYFQGTVSQYACQRRTTMENHNQIFTDAFAILAENAEFNENEGPCLAFRRAASLLKSLPHAISSSKDLEGLPCLGDQTKAVIEDIFEYGQCSKVQDVLCDDRYQTIKLFTSVFGVGLKTAEKWYRKGFHSLEEVQADKAIHFTKMQKAGFLYYDDISAAVCKAEADAIGQVVEETVRLIAPDAIVTLTGGFRRGKEIGHDVDFLITTPEMGKEQLLPRVINLLEKKGLLLYYDLVESTFDKTRLPCRKFEAMDHFQKCFAIIKLKKELAAGRVQKDWKAIRVDFVMPPVDNFAFALLGWTGSRQFERDLRRFARHERKMLLDRHALYDKTKKIFLPAKTEEDIFAHLGLDYIPPWQRNA

SEQ ID NO: 670 - protein, 362 aa, Artificial Sequence
  Modified TdT Sequence
MENLYFQGTVSQYACQRRTTMENHNQIFTDAFAILAENAEFNESEGPALAFRRAASLLKSLPHAISSSKDLEGLPCLGDQTKAVIEEILEYGQCSKVQDVLCDDRYQTIKLFTSVFGVGLKTAEKWYRKGFHSLEEVQADKAIQFTKMQKAGFLYYDDISAAVCKAEADAIGQIVEETVRAIAPDAIVTLTGGFRRGKECGHDVDFIITTPEMGKEQLLPDVINLLEKKGLLLYYDLVESTFDKTRLPCRKFEAMDHFQKCFAIIKLKKELAAGRVQKDWKAIRVDFVMPPIDNFAFALLGWTGSRQFERDLRRFARHERKMLLDRHALYDKTKKIFLPAKTEEDIFAHLGLDYIPPWQRNA

SEQ ID NO: 671 - protein, 362 aa, Artificial Sequence
  Modified TdT Sequence
MENLYFQGTVSQYACQRRTTMENHNQIFTDAFAILAENAEFNESEGPCLAFRRAASLLKSLPHAISSSKDLEGLPCLGDQTKAVIEDILEYGQCSKVQDVLCDDRYQTIKLFTSVFGVGLKTAEKWYRKGFHSLEEVQADKAIHFTKMQKAGFLYYDDISAAVCKAEADAIGQIVEETVRLIAPDAIVTLTGGFRRGKEIGHDVDFLITTPEMGKEQLLPKVINLWEKKGLLLYYDLVESTFDKTRLPCRKFEAMDHFQKCFAIIKLKKELADGRVQKDWKAIRVDFVMPPVDNFAFALLGWTGSRQFERDLRRFARHERKMLLDRHALYDKTKKIFLPAKTEEDIFAHLGLDYIPPWQRNA

SEQ ID NO: 672 - protein, 362 aa, Artificial Sequence
  Modified TdT Sequence
MENLYFQGTVSQYACQRRTTMENHNQIFTDAFAILAENAEFNESEGPCLAFRRAASLLKSLPHAISSSKDLEGLPCLGDQTKAVIEDILEYGQCSKVQDVLCDDRYQTIKLFTSVFGVGLKTAEKWYRKGFHSLEEVQADKAIHFTKMQKAGFLYYDDISAAVCKAEADAIGQIVEETVRLIAPDAIVTLTGGFRRGKECGHDVDFLITTPEAGKEQLLPKVINLWEKKGLLLYYDLVESTFDKSRLPCRKFEAMDHFQKCFAIIKLKKELAAGRVQKDWKAIRVDFVMPPVDCFAFALLGWTGSRQFERDLRRFARHERKMLLDRHALYDKTKKIFLPAKTEEDIFAHLGLDYIPPWQRNA

SEQ ID NO: 673 - protein, 362 aa, Artificial Sequence
  Modified TdT Sequence
MENLYFQGTVSQYACQRRTTMENHNQIFTDAFAILAENAEFNESEGPALAFRRAASLLKSLPHAISSSKDLEGLPCLGDQTKAVIEDILEYGQCSKVQDVLCDDRYQTIKLFTSVFGVGLKTAEKWYRKGFHSLEEVQADKAIQFTKMQKAGFLYYDDISAAVCKAEADAIGQIVEETVRKMAPDAIVTLTGGFRRGKECGHDVDFLITTPEMGKEQLLPDVINLLEKKGLLLYYDLVESTFDKTRLPCRKFEAMDHFQKCFAIIKLKKELAAGRVQKDWKAIRVDFVMPPIDNFAFALLGWTGSRQFERDLRRFARHERKMLLDRHALYDKTKRIFLPAKTEEDIFAHLGLDYIPPWQRNA

SEQ ID NO: 674 - protein, 362 aa, Artificial Sequence
  Modified TdT Sequence
MENLYFQGTVSQYACQRRTTMENHNQIFTDAFAILAENAEFNESEGPCLAFRRAASLLKSLPHAISSSKDLEGLPCLGDQTKAVIEDILEYGQCSKVQDVLCDDRYQTIKLFTSVFGVGLKTAEKWYRKGFHSLEEVQADKAIHFTKMQKAGFLYYDDISAAVCKAEADAIGQIVEETVRLIAPDAIVTLTGGFRRGKEIGHDVDFLITTPEMGKEQLLPKVINLLEKKGLLLYYDLVESTFDKTRLPCRKFEAMDHFQQCFAIIKLKQELAAGRVQKDWKAIRVDFVMPPVDNFAFALLGWTGSRQFERDLRRFARHERKMLLDRHALYDKTKKIFLPAKTEEDIFAHLGLDYIPPWQRNA

SEQ ID NO: 675 - protein, 362 aa, Artificial Sequence
  Modified TdT Sequence
MENLYFQGTVSQYACQRRTTMENHNQIFTDAFAILAENAEFNESEGPCLAFRRAASLLKSLPHAISSSKDLEGLPCLGDQTKAVIEDILEYGQCSKVQDVLCDDRYQTIKLFTSVFGVGLKTAEKWYRMGFHSLEEVQADKAIHFTKMQKAGFLYYDDISAAVCKAEADAIGQIVEETVRLIAPDAIVTLTGGFRRGKECGHDVDFLITTPEMGKEQLLPKVINLLEKKGLLLYYDLVESTFDKTRLPCRKFEAMDHFQKCFAIIKLKKELAAGRVQKDWKAIRVDFVMPPVDNYAFALLGWTGSRQFERDLRRFARHERKMLLDRHALYDKTKKIFLPAKTEEDIFAHLGLDYIPPWQRNA

SEQ ID NO: 676 - protein, 362 aa, Artificial Sequence
  Modified TdT Sequence
MENLYFQGTVSQYACQRRTTMENHNQIFTDAFAILAENAEFNESEGPCLAFRRAASLLKSLPHAIISSKDLEGLPCLGDQTKAVIEDILEYGQCSKVQDVLCDDRYQTIKLFTSVFGVGLKTAEKWYRKGFHSLEEVQADKAIHFTKMQKAGFLYYDDISAAVCKAEADAIGQIVEETVRGIAPDAIVTLTGGFRRGKECGHDVDFLITTPEMGKEQLLPKVINLWEKKGLLLYYDLVESTFDKTRLPCRKFEAMDHFQKCFAIIKLKKELAAGRVQKDWKAIRVDFVMPPVDCFAFALLGWTGSRQFERDLRRFARHERKMLLDRHALYDKTKKIFLPAKTEEDIFAHLGLDYIPPWQRNA

SEQ ID NO: 677 - protein, 362 aa, Artificial Sequence
  Modified TdT Sequence
MENLYFQGTVSQYACQRRTTMENHNQIFTDAFAILAENAEFNESEGPALAFRRAASLLKSLPHAISSSKDLEGLPCLGDQTKAVIEDILEYGQCSKVQDVLCDDRYQTIKQFTSVFGVGLKTAEKWYRKGFHSLEEVQADKAIHFTKMQKAGFLYYDDISAAVCKAEADAIGQIVEETVRLIAPDAIVTLTGGFRRGKECGHDVDFLITTPEMGKEQLLPKVINLWEKKGLLLYYDLVESTFDKTRLPCRKFEAMDHFQKCFAIIKLKKELAAGRVQKDWKAIRVDFVMPPVDNFAFALLGWTGSRQFERDLRRFARHERKMLLDRHALYDKRKKIFLPAKTEEDIFAHLGLDYIPPWQRNA

SEQ ID NO: 678 - protein, 362 aa, Artificial Sequence
  Modified TdT Sequence
MENLYFQGTVSQYACQRRTTMENHNQIFTDAFAILAENAEFNENEGPAVAFRRAASLLKSLPHAISSSKDLEGLPCLGDQTKAVIEDILEYGQCSKVQDVLCDDRYQTIKLFTSVFGVGLKTAEKWYRKGFHSLEEVQADKAIQFTKMQKAGFLYYDDISAAVCKAEADAIGQIVEETVRLIAPDAIVTLTGGFRRGKEIGHDVDFLITTPEMGKEQLLPKVINLLEKKGLLLYYDLVESTFDKTRLPCRKFEAMDHFQKCFAILKLKKELAAGRVQKDWKAIRVDFVMPPVDNFAFALLGWTGSRQFERDLRRFARHERKMLLDRHALYDKTKKIFLPAKTEEDIFAHLGLDYIPPWQRNA

SEQ ID NO: 679 - protein, 362 aa, Artificial Sequence
  Modified TdT Sequence
MENLYFQGTVSQYACQRRTTMENHNQIFTDAFAILAENAEFNESEGPALAFRRAASLLKSLPHAISSLKDLEGLPCLGDQTKAVIEDILEYGQCSKVQDVLCDDRYQTIKLFTSVFGVGLKTAEKWYRKGFHSLEEVQADKAIQFTKMQKAGFLYYDDISAAVCKAEADAIGQIVEETVRLIAPDAIVTLTGGFRRGKECGHDVDFLITTPEQGKEQLLPDVINLLEKKGLLLYYDLVESTFDKTRLPCRKFEAMDHFQKCFAIIKLNKELAAGRVQKDWKAIRVDFVMPPIDNFAFALLGWTGSRQFERDLRRFARHERKMLLDRHALYDKTKKIFLPAKTEEDIFAHLGLDYIPPWQRNA

SEQ ID NO: 680 - protein, 362 aa, Artificial Sequence
  Modified TdT Sequence
MENLYFQGTVSQYACQRRTTMENHNQIFTDAFAILAENAEFNESEGPCLAFLRAASLLKSLPHAISSSKDLEGLPCLGDQTKAVIEDILEYGQCSKVQDVLCDDRYQTIKLFTSVFGVGLKTAEKWYRKGFHSLEEVQADKAIHFTKMQKAGFLYYDDISAAVCKAEADAIGQIVEETVRLIAPDAIVTLTGGFRRGKEIGHDVDFLITTPEAGKEQLLPRVINLLEQKGLLLYYDLVESTFDKTRLPCRKFEAMDHFQKCFAIIKLKKELAAGRVQKDWKAIRVDFVMPPVDNFAFALLGWTGSRQFERDLRRFARHERKMLLDRHALYDKTKKIFLPAKTEEDIFAHLGLDYIPPWQRNA

SEQ ID NO: 681 - protein, 362 aa, Artificial Sequence
  Modified TdT Sequence
MENLYFQGTVSQYACQRRTTMENHNQIFTDAFAILAENAEFNESEGPALAFRRAASLLKSLPHAISSSKDLEGLPCLGDQTKAVIEDILEYGQCSKVQDVLCDDRYKTIKLFTSVFGVGLKTAEKWYRKGFHSLEEVQADKSIHFTKMQKAGFLYYDDISAAVCKAEADAIGQIVEETVRLIAPDAIVTLTGGFRRGKECGHDVDFLITTPEMGKEQLLPDVINLLEKKGLLLYYDLVESTFDKTRLPCRKFEAMDHFQKCFAIIKLKKELAAGRVQKDWKAIRVDFVMPPIDNFAFTLLGWTGSRQFERDLRRFARHERKMLLDRHALYDKTKKIFLPAKTEEDIFAHLGLDYIPPWQRNA

SEQ ID NO: 682 - protein, 362 aa, Artificial Sequence
  Modified TdT Sequence
MENLYFQGTVSQYACQRRTTMENHNQIFTDAFAILAENAEFNESEGPCLAFRRAASLLKSLPHAISSSKDLEGLPCLGDQTKAVIEDILEYGQCSKVQDVLCDDRYQTIKLFTSVFGVGLKTAEKWYRKGFHSLEEVQADKAIHFTKMQKAGFLYYDDISAAVCKAEADAIGQIVEETVRLIAPDAIVTLTGGFRRGKECGHDVDFLITTPEMGKEQLLPKVINLWEKKGLLLYYDLVESTFDKTRLPCRKFEAMDHFQKCFAIIKLKKQLAAGRVQKDWKAIRVDFVLPPVDCFAFALLGWTGSRQFERDLRRFARHERKMLLDRHALYDKTKKIFLPAKTEEDIFAHLGLDYIPPWQRNA

SEQ ID NO: 683 - protein, 362 aa, Artificial Sequence
  Modified TdT Sequence
MENLYFQGTVSQYACQRRTTMENHNQIFTDAFAILAENAEFNENEGPCLAFRRAASLLKSLPHAISCSKDLEGLPCLGDQTKAVIEDILEYGQCSKVQDVLCDDRYQTIKLFTSVFGVGLKTAEKWYRKGFHSLEEVQADKAIQFTKMQKAGFLYYDDISAAVCKAEADAIGQIVEETVRLIAPDAIVTLTGGFRRGKECGHDVDFLITTPEMGKEQLLPKVINLWEKKGLLLYYDLVESTFDKTRLPCRKFEAMDHFQKCFAIIKLKKELAAGRVQKDWKAIRVDFVMPPVDNFAFALLGWTGSRQFERDLRRFARHERKMLLDRHALYDKTKKIFLPAKTEEDIFAHLGLDYIPPWQRNA

SEQ ID NO: 684 - protein, 362 aa, Artificial Sequence
  Modified TdT Sequence
MENLYFQGTVSQYACQRRTTMENHNQIFTDAFAILAENAEFNESEGPALAFRRAASLLKSLPHAISSSKDLEGLPCLGDQTKAVIEDILEYGQCSKVQDVLCDDRYQTIKLFTSVFGVGLKTAEKWYRKGFHSLEEVQADKAIQFTKMQKAGFLYYDDISAAVCKAEADAIGQIVEETVRLIAPDAIVTLTGGFRRGKECGHDVDFLITTAEQGKEQLLPKVINLLEKKGLLLYYDLVESTFDKTRLPCRKFEAMDHFQKCFAIIKLKKELAAGRVQKDWKAIRVDFVMPPADNFAFALLGWTGSRQFERDLRRFARHERKMLLDRHALYDKTKKIFLPAKTEEDIFAHLGLDYIPPWQRNA

SEQ ID NO: 685 - protein, 362 aa, Artificial Sequence
  Modified TdT Sequence
MENLYFQGTVSQYACQRRTTMENHNQIFTDAFAILAENAEFNESEGPALAFRRAASLLKSLPHAISSSKDLEGLPCLGDQTKAVIEDILEYGQCSKVQDVLCDDRYQTIKLFTSVFGVGLKTAEKWYRKGFHTLEEVQADKAIQFTKMQKAGFLYYDDISAAVCKAEADAIGQIVEETVRLIAPDAIVTLTGGFRRGKEIGHDVDFLITTPEMGKEQLLPKVINLLEQKGLLLYYELVESTFDKTRLPCRKFEAMDHFQKCWAIIKLKKELAAGRVQKDWKAIRVDFVMPPVDNFAFALLGWTGSRQFERDLRRFARHERKMLLDRHALYDKTKKIFLPAKTEEDIFAHLGLDYIPPWQRNA

SEQ ID NO: 686 - protein, 362 aa, Artificial Sequence
  Modified TdT Sequence
MENLYFQGTVSQYACQRRTTMENHNQIFTDAFAILAENAEFNESEGPCLAFLRAASLLKSLPHAISSSKDLEGLPCLGDQTKAVIEDILEYGQCSKVQDVLCDDRYQTIKLFTSVFGVGLKTAEKWYRKGFHSLEEVQADKAIHFTKMQKAGFLYYDDISAAVCKAEADAIGQIVEETVRGIAPDAIVTLTGGFRRGKEIGHDVDFLITTPEMGKEQLLPRVINLLEKKGLLLFYDLVESTFDKTRLPCRKFEAMDHFQKCFAIIKLKKELAAGRVQKDWKAIRVDFVMPPVDNFAFALLGWTGSRQFERDLRRFARHERKMLLDRHALYDKTKKIFLPAKTEEDIFAHLGLDYIPPWQRNA

SEQ ID NO: 687 - protein, 362 aa, Artificial Sequence
  Modified TdT Sequence
MENLYFQGTVSQYACQRRTTTENHNQIFTDAFAILAENAEFNESEGPALAFRRAASLLKSLPHAISSSKDLEGLPCLGDQTKAVIEDILEYGQCSKVQDVLCDDRYQTIKLFTSVFGVGLKTAEKWYRKGFHSLEEVQADKAIQFTKMQKAGFLYYDDISAAVCKAEADAIGQIVEETVRLIAPDAIVTLTGGFRRGKECGHDVDFIITTPEMGKEQLLPDVINLLEKKGLLLYYDLVESTFDKTRLPCRKFEAMDHFQKCFAIIKLKKERAAGRVQKDWKAIRVDFVMPPIDNFAFALLGWTGSRQFERDLRRFARHERKMLLDRHALYDKTKKIFLPAKTEEDIFAHLGLDYIPPWQRNA

SEQ ID NO: 688 - protein, 362 aa, Artificial Sequence
  Modified TdT Sequence
MENLYFQGTVSQYACQRRTTMENHNQIFTDAFAILAENAEFNESEGPCLAFRRAASLLKSLPHAISSSKDLEGLPCLGDQTKAVIEDILEYGQCSKVQDVLCDDRYQTIKLFTSVFGVGLKTAEKWYRKGFHSLEEVQADKAIHFTKMQKAGFLYYDDISAAVCKAEADAIGQIVEETVRLIAPDAIVTLTGGFRRGKECGHDVDFLITTPEAGKEQLLPRVINLWEQKGLLLYYDLVESTFDKTRLPCRKFEAMDHFQKCFAIIKLKKELAAGRVQKDWKAIRVDFVMPPVDNFAFALLGWTGSRQFERDLRRFARHERKMLLDRHALYDKTKKIFLPAKTEEDIFAHLGLDYIPPWQRNA

SEQ ID NO: 689 - protein, 362 aa, Artificial Sequence
  Modified TdT Sequence
MENLYFQGTVSQYACQRRTTMENHNKIFTDAFAILAENAEFNESEGPALAFRRAASLLKSLPHAISSSKDLEGLPCLGDQTKAVIEDILEYGQCSKVQDVLCDDRYQTIKLFTSVFGVGLKTAEKWYRKGFHSLEEVQADKAIHFTKMQKAGFLYYDDISAAVCKAEADAIGQIVEETVRLIAPDAIVTLTGGFRRGKEIGHDVDFLITTPEMGKEQLLPRVIDLLEKKGLLLYYDLVESTFDKTRLPCRKFEAMDHFQKCFAIIKLKKELADGRVQKDWKAIRVDFVMPPVDNFAFALLGWTGSRQFERDLRRFARHERKMLLDRHALYDKTKKIFLPAKTEEDIFAHLGLDYIPPWQRNA

SEQ ID NO: 690 - protein, 362 aa, Artificial Sequence
  Modified TdT Sequence
MENLYFQGTVSQYACQRRTTMENHNQIFTDAFAILAENAEFRESEGPAVAFRRAASLLKSLPHAISSSKDLEGLPCLGDQTKAVIEDILEYGQCSKVQDVLCDDRYQTIKLFTSVFGVGLKTAEKWYRKGFHSLEEVQADKAIQFTKMQKAGFLYYDDISAAVCKAEADAIGQIVEETVRLIAPDAIVTLTGGFRRGKEIGHDVDFLITTPEMGKEQLLPKVINLLEKKGLLLYYDLVESTFDKTRLPCRKFEAMDHFQKCFAIIKLKKEQAAGRVQKDWKAIRVDFVMPPVDNFAFALLGWTGSRQFERDLRRFARHERKMLLDRHALYDKTKKIFLPAKTEEDIFAHLGLDYIPPWQRNA

SEQ ID NO: 691 - protein, 362 aa, Artificial Sequence
  Modified TdT Sequence
MENLYFQGTVSQYACQRRTTMENHNQIFTDAFAILAENAEFNESEGPCLAFRRAASLLKSLPHAISRSKDLEGLPCLGDQTKAVIEDILEYGQCSKVQDVLCDDRYQTIKLFTSVFGVGLKTAEKWYRKGFHSLEEVQAEKAIHFTKMQKAGFLYYDDISAAVCKAEADAIGQIVEETVRLIAPDAIVTLTGGFRRGKECGHDVDFLITTPEMGKEQLLPKVINLWEQKGLLLYYDLVESTFDKTRLPCRKFEAMDHFQKCFAIIKLKKELAAGRVQKDWKAIRVDFVMPPVDNFAFALLGWTGSRQFERDLRRFARHERKMLLDRHALYDKTKKIFLPAKTEEDIFAHLGLDYIPPWQRNA

SEQ ID NO: 692 - protein, 362 aa, Artificial Sequence
  Modified TdT Sequence
MENLYFQGTVSQYACQRRTTMENHNQIFTDAFAILAENAEFNESEGPALAFRRAASLLKSLPHAISSSKDLEGLPCLGDQTKGVIEDILEYGQCSKVQDVLCDDRYQTIKLFTSVFGVGLKTAEKWYRKGFHSLEEVQADKAIQFTKMQKAGFLYYDDISAAVCKAEADAIGQIVEETVRLIAPDAIVTLTGGFRRGKECGHDVDFLITTPEMGKEQLLPKVIDLLEKKGLLLYYDLVESTFDKTRLPCRKFEAMDHFQKCFAIIKLKKELAAGRVQKDWKAIRVDFVMPPVDNFAFALLGWTGSRQFERDLRRFARHERKMLLDRHALYDKTKKIFLPAKTEEDIFAHLGLDYIPPWQRNA

SEQ ID NO: 693 - protein, 362 aa, Artificial Sequence
  Modified TdT Sequence
MENLYFQGTVSQYACQRRTTMENHNQIFTDAFAILAENAEFNESEGPCLAFRRAASLLKSLPHAISSSKDLEGLPCLGDQTKAVIEDILEYGQCSKVQDVLCDDRYQTIKLFTSVFGVGLKTAEKWYRKGFHSLEEVQADKAIHFTKMQKAGFLYYDDISAAVCKAEADAIGQIVEETVRLIAPDAIVTLTGGFRRGKECGHDVDFLITTPEMGKEQLLPRVINLLEKKGLLLYYDLVESTFDKTRLPCRKFEAMDHFQKCFAIIKLKKELADGRVQKDWKAIRVDFVMPPIDNFAFALLGWTGSRQFERDLRRFARHERKMLLDRHALYDKTKKIFLPAKTEEDIFAHLGLDYIPPWQRNA

SEQ ID NO: 694 - protein, 362 aa, Artificial Sequence
  Modified TdT Sequence
MENLYFQGTVSQYACQRRTTMENHNQIFTDAFAILAENAEFNESESPCLAFRRAASLLKSLPHAISSSKDLEGLPCLGDQTKAVIEDILEYGQCSKVQDVLCDDRYQTIKLFTSVFGVGLKTAEKWYRKGFHSLEEVQADKAIHFTKMQKAGFLYYDDISAAVCKAEADAIGQIVEETVRLIAPDAIVTLTGGFRRGKEIGHDVDFLITTPEMGKEQLLPRVINLLEKKGLLLFYDLVESTFDKTRLPCRKFEAMDHFQKCFAIIKLKQELAAGRVQKDWKAIRVDFVMPPVDNFAFALLGWTGSRQFERDLRRFARHERKMLLDRHALYDKTKKIFLPAKTEEDIFAHLGLDYIPPWQRNA

SEQ ID NO: 695 - protein, 362 aa, Artificial Sequence
  Modified TdT Sequence
MENLYFQGTVSQYACQRRTTMENHNQIFTDAFAILAENAEFNESEGPCLAFRRAASLLKSLPHAISSSKDLEGLPCLGDQTKAVIEDILEYGQCSKAQDVLCDDRYQTIKLFTSVFGVGLKTAEKWYRKGFHSLEEVQAEKAIHFSKMQKAGFLYYDDISAAVCKAEADAIGQIVEETVRLIAPDAIVTLTGGFRRGKECGHDVDFLITTPEMGKEQLLPKVINLWEKKGLLLYYDLVESTFDKTRLPCRKFEAMDHFQKCFAIIKLKKELAAGRVQKDWKAIRVDFVMPPVDNFAFALLGWTGSRQFERDLRRFARHERKMLLDRHALYDKTKKIFLPAKTEEDIFAHLGLDYIPPWQRNA

SEQ ID NO: 696 - protein, 362 aa, Artificial Sequence
  Modified TdT Sequence
MENLYFQGTVSQYACQRRTTMENHNQIFTDAFAILAENAEFNESEGPALAFRRAASLLKSLPHAISSSKDLEGLPCLGDQTKAVIEDILEYGQCSKVQDVLCDDRYQTIKLFTSVFGVGLKTAEKWYRMGFHSLEEVQADKAIHFTKMQKAGFLYYDDISAAVCKAEADAIGQIVEETVRLIAPDAIVTLTGGFRRGKEIGHDVDFLITTPEMGREQLLPRVINLLEKKGLLLYYDLVESTFDKTRLPCRKFEAMDHFQKCFAIIKLKKELAAGRVQKDWKAIRVDFVMPPVDNFAFALLGWTGSRQFERDLRRFARHERKMLLDRHALYDKTKKIFLPAKTEEDIFAHLGLDYIPPWQRNA

SEQ ID NO: 697 - protein, 362 aa, Artificial Sequence
  Modified TdT Sequence
MENLYFQGTVSQYACQRRTTMENHNQIFTDAFAILAENAEFNESEGPCLAFRRAASLLKSLPHAISSSKDLEGLPCLGDQTKAVIEDILEYGQCSKVQDVLCDDRYQTIKLFTSVFGVGLKTAEKWYRMGFHSLEEVQADKAIHFTKMQKAGFLYYDDISAAVCKAEADAIGRIVEETVRGIAPDAIVTLTGGFRRGKECGHDVDFLITTPEMGKEQLLPKVINLWEKKGLLLYYDLVESTFDKTRLPCRKFEAMDHFQKCFAIIKLKKELAAGRVQKDWKAIRVDFVMPPVDNFAFALLGWTGSRQFERDLRRFARHERKMLLDRHALYDKTKKIFLPAKTEEDIFAHLGLDYIPPWQRNA

SEQ ID NO: 698 - protein, 362 aa, Artificial Sequence
  Modified TdT Sequence
MENLYFQGTVSQYACQRRTTMENHNQLFTDAFAILAENAEFNESEGPALAFRRAASLLKSLPHAISSLKDLEGLPCLGDQTKAVIEDILEYGQCSKVQDVLCDDRYQTIKLFTSVFGVGLKTAEKWYRKGFHSLEEVQADKAIQFTKMQKAGFLYYDDISAAVCKAEADAIGQIVEETVRLIAPDAIVTLTGGFRRGKECGHDVDFLITTPEMGKEQLLPDVINLLEKKGLLLYYDLVESTFDKTRLPCRKFEAMDHFQKCFAIIKLKKELAAGCVQKDWKAIRVDFVMPPIDNFAFALLGWTGSRQFERDLRRFARHERKMLLDRHALYDKTKKIFLPAKTEEDIFAHLGLDYIPPWQRNA

SEQ ID NO: 699 - protein, 362 aa, Artificial Sequence
  Modified TdT Sequence
MENLYFQGTVSQYACQRRTTMENHNQIFTDAFAILAENAEFNESEGPALAFRRAASLLKSLPHAISSSKDLEGLPCLGDQTKAVIEDILEYGQCSKVQDVLCDDRYQTIKLFTSVFGVGLKTAEKWYRKGFHSLEEVQADKAIQFTKMQKAGFLYYDDISAAVCKAEADAIGQIVEETVRLIAPDAIVTLTGGFRRGKEIGHDVDFLITTPEMGREQLLPKVINLLEKKGLLLYYHLVESTFDKTRLPCRKFEAMDHFQKCFAIIKLKKELAAGRVQKDWKAIRVDFVMPPVDNFAFALLGWTGSRQFERDLRRFARHERKMLLDRHALYDKTKRIFLPAKTEEDIFAHLGLDYIPPWQRNA

SEQ ID NO: 700 - protein, 362 aa, Artificial Sequence
  Modified TdT Sequence
MENLYFQGTVSQYACQRRTTMENHNQIFTDAFAILAENAEFNESEGPALAFRRAASLLKSLPHAISSSKDLEGLPCLGDQTKAVIEDILEYGQCSKVQDVLCDDRYKTIKLFTSVFGVGLKTAEKWYRKGFHSLEEVQADKAIQFTKMQKAGFLYYDDISAAVCKAEADAIGQIVEETVRLIAPDAIVTLTGGFRRGKECGHDVDFLITTPEMGKEQLLPDVINLLEKKGLLLYYDLVESTFDKTRLPCRKFEAMDHFQKCFAIIKLKKELAAGRVQKDWKAIRVDFVMPPIDNFAFALLGWTGSRQFERDLRRFARHERKMLLDRHALFDKTKKIFLPAKTEEDIFAHLGLEYIPPWQRNA

SEQ ID NO: 701 - protein, 362 aa, Artificial Sequence
  Modified TdT Sequence
MENLYFQGTVSQYACQRRTTMENHNQIFTDAFAILAENAEFNESEGPCLAFRRAASLLKSLPHAISSSKDLEGLPCLGDQTKAVMEDILEYGQCSKVQDVLCDDRYQTIKLFTSVFGVGLKTAEKWYRKGFHSLEEVQADKAIHFTKMQKAGFLYYDDISAAVCKAEADAIGQIVEETVRLIAPDAIVTLTGGFRRGKECGHDVDFLITTPEMGREQLLPKVINLWEKKGLLLYYDLVESTFDKTRLPCRKFEAMDHFQKCFAIIKLKKELAAGRVQKDWKAIRVDFVLPPVDNFAFALLGWTGSRQFERDLRRFARHERKMLLDRHALYDKTKKIFLPAKTEEDIFAHLGLDYIPPWQRNA

SEQ ID NO: 702 - protein, 362 aa, Artificial Sequence
  Modified TdT Sequence
MENLYFQGTVSQYACQRRTTMENHNQIFTDAFAILAENAEFNESEGPCLAFRRAASLLKSLPHAISSSKDLEGLPCLGDQTKAVIEDILEYGQCSKVQDVLCDDRYQTIKLFTSVFGVGLKTAEKWYRKGFHSLEEVQADKAIHFTKMQKAGFLYYDDISAAVCKAEADAIGQIVEETVRLIAPDAIVTLTGGFRRGKEIGHDVDFLITTPEMGKEQLLPRVINLLEKKGLLLYYDLVESTFDKTRLPCRKFEAMDHFQKCFAIIKLKKELAAGRVQKDWKAIRVDFVMPPVDCFAFALLGWTGSRQFERDLRRFARHERKMLLDRHALYDRTKKIFLPAKTEEDIFAHLGLDYIDPWQRNA

SEQ ID NO: 703 - protein, 362 aa, Artificial Sequence
  Modified TdT Sequence
MENLYFQGTVSQYACQRRTTMENHNQIFTDAFAILAENAEFNESEGPALAFRRAASLLKSLPHAISSSKDLEGLPCLGDQTKAVIEDILEYGQCSKVQDVLCDDRYQTIKLFTSVFGVGLKTAEKWYRKGFHSLEEVQADKAIHFTKMQKAGFLYYDDISAAVCKAEADAIGQIVEETVRLIAPDAIVTLTGGFRRGKEIGHDVDFLITTPEMGKEQLLPKVINLLEQKGLLLYYDLVESTFDKTRLPCRKFEAMDHFQKCFAIIKLKKELAAGRVQKDWKAIRVDFVMPPADNFAFALLGWTGSRQFERDLRRFARHERKMLLDRHALYDKTKKIFLPAKTEEEIFAHLGLDYIPPWQRNA

SEQ ID NO: 704 - protein, 362 aa, Artificial Sequence
  Modified TdT Sequence
MENLYFQGTVSQYACQRRTTMENHNQIFTDAFAILAENAEFNESEGPCLAFRRAASLLKSLPHAISSSKDLEGLPCLGDQTKAVIEDILEYGQCSKVQDVLCDDRYQTIKLFTSVFGVGLKTAEKWYRKGFHSLEEVQADKAIHFTKMQRAGFLYYDDISAAVCKAEADAIGQIVEETVRLIAPDAIVTLTGGFRRGKECGHDVDFLITTPEMGKEQLLPKVINLWEKKGLLLYYDLVESTFDKTRLPCRKFEAMDNFQKCFAIIKLKKELAAGRVQKDWKAIRVDFVMPPVDNFAFALLGWTGSRQFERDLRRFARHERKMLLDRHALYDKRKKIFLPAKTEEDIFAHLGLDYIPPWQRNA

SEQ ID NO: 705 - protein, 362 aa, Artificial Sequence
  Modified TdT Sequence
MENLYFQGTVSQYACQRRTTMENHNQIFTDAFAILAENAEFNESEGPCLAFRRAASVLKSLPHAISSSKDLEGLPCLGDQTKAVIEDILEYGQCSKVQDVLCDDRYQTIKLFTSVFGVGLKTAEKWYRKGFHSLEEVQADKAIHFTKMQKAGFLYYDDISAAVCKAEADAIGQIVEETVRLIAPDAIVTLTGGFRRGKECGHDVDFLITTPEMGKEQLLPKVIRLWEKKGLLLYYDLVESTFDKTRLPCRKFEAMDHFQKCFAIIKLKKELAAGRVQKDWKAIRVDFVMPPVDRFAFALLGWTGSRQFERDLRRFARHERKMLLDRHALYDKTKKIFLPAKTEEDIFAHLGLDYIPPWQRNA

SEQ ID NO: 706 - protein, 362 aa, Artificial Sequence
  Modified TdT Sequence
MENLYFQGTVSQYACQRRTTMENHNQIFTDAFAILAENAEFNESEGPALAFRRAASLLKSLPHAISSLKDLEGLPCLGDQTKAVIEDILEYGQCSKVQDVLCDDRYQTIKLFTSVFGVGLKTAEKWYRMGFHSLEEVQADKAIQFTKMQRAGFLYYDDISAAVCKAEADAIGQIVEETVRLIAPDAIVTLTGGFRRGKEIGHDVDFLITTPEMGKEQLLPKVINLLEKKGLLLYYDLVESTFDKTRLPCRKFEAMDHFQKCFAIIKLKKELAAGRVQKDWKAIRVDFVMPPVDNFAFALLGWTGSRQFERDLRRFARHERKMLLDRHALYDKTKKIFLPAKTEEDIFAHLGLDYIPPWQRNA

SEQ ID NO: 707 - protein, 362 aa, Artificial Sequence
  Modified TdT Sequence
MENLYFQGTVSQYACQRRTTMENHNQIFTDAFAILAENAEFNESEGPALAFRRAASLLKSLPHAISSSKDLEGLPCLGDQTKAVIEDILEYGQCSKVQDVLCDDRYQTIKLFTSVFGVGLKTAEKWYRKGFHSLEEVQADKAIQFTKMQKAGFLYYDDISAAVCKAEADAIGQIVEETVRLIAPDAIVTLTGGFRRGKEIGHDVDFIITTPEMGKEQLLPKVIDLLEKKGLLLYYDLVESTFDKTRLPCRKFEAMDHFQKCFAIIKLKKERAAGRVQKDWKAIRVDFVMPPVDNFAFALLGWTGSRQFERDLRRFARHERKMLLDRHALYDKTKKIFLPAKTEEDIFAHLGLDYIPPWQRNA

SEQ ID NO: 708 - protein, 362 aa, Artificial Sequence
  Modified TdT Sequence
MENLYFQGTVSQYACQRRTTLENHNQIFTDAFAILAENAEFNESEGPALAFRRAASLLKSLPHAISSSKDLEGLPCLGDQTKAVIEDILEYGQCSKVQDVLCDDRYQTIKLFTSVFGVGLKTAEKWYRKGFHSLEEVQADRAIQFTKMQKAGFLYYDDISAAVCKAEADAIGQIVEETVRLIAPDAIVTLTGGFRRGKECGHDVDFLITTPEQGKEQLLPDVINLLEKKGLLLYYDLVESTFDKTRLPCRKFEAMDHFQKCFAIIKLKKELAAGRVQKDWKAIRVDFVMPPIDNFAFALLGWTGSRQFERDLRRFARHERKMLLDRHALYDKTKRIFLPAKTEEDIFAHLGLDYIPPWQRNA

SEQ ID NO: 709 - protein, 362 aa, Artificial Sequence
  Modified TdT Sequence
MENLYFQGTVSQYACQRRTTMENHNQIFTDAFAILAENAEFNESEGPCLAFRRAASLLKSLPHAISSSKDLEGLPCLGDQTKAVIEDILEYGQCSKVQDVLCDDRYQTIKLFTSVFGVGPKTAEKWYRKGFHSLEEVQADKAIHFTKMQKAGFLYYDDISAAVCKAEADAIGCIVEETVRLIAPDAIVTLTGGFRRGKEIGHDVDFLITTPEMGKEQLLPRVINLLEKKGLLLYYDLVESTFDKTRLPCRKFEAMDHFQKCFAIIKLKKELAAGRVQKDWKAIRVDFVMPPVDNFAFALLGWTGSRQFERDLRRFARHERKMLLDRHALYDKTKKIFLPAKTEEDIFAHLGLDYIDPWQRNA

SEQ ID NO: 710 - protein, 362 aa, Artificial Sequence
  Modified TdT Sequence
MENLYFQGTVSQYACQRRTTMENHNQIFTDAFAILAENAEFNESEGPCLAFRRAASVLKSLPHAISCSKDLEGLPCLGDQTKAVIEDILEYGQCSKVQDVLCDDRYQTIKLFTSVFGVGLKTAEKWYRKGFHSLEEVQADKAIHFTKMQRAGFLYYDDISAAVCKAEADAIGQIVEETVRLIAPDAIVTLTGGFRRGKECGHDVDFLITTPEMGKEQLLPKVINLWEKKGLLLYYDLVESTFDKTRLPCRKFEAMDHFQKCFAIIKLKKELAAGRVQKDWKAIRVDFVMPPVDNFAFALLGWTGSRQFERDLRRFARHERKMLLDRHALYDKTKKIFLPAKTEEDIFAHLGLDYIPPWQRNA

SEQ ID NO: 711 - protein, 362 aa, Artificial Sequence
  Modified TdT Sequence
MENLYFQGTVSQYACQRRTTMENHNQIFTDAFAILAENAEFNENEGPALAFRRAASLLKSLPHAISSSKDLEGLPCLGDQTKAVIEDILEYGQCSKVQDVLCDDRYQTIKLFTSVFGVGLKTAEKWYRKGFHSLEEVQADKAIHFTKMQKAGFLYYDDISAAVCKAEADAIGQIVEETVRLIAPDAIVTLTGGFRRGKEIGHDVDFLITTPEMGKEQLLPDVIDLLEKKGLLLYYDLVESTFDKTRLPCRKFEAMDHFQKCFAIIKLKKELAAGRVQKDWKAIRVDFVMPPVDNFAFALLGWTGSRQFERDLRRFARHERKMLLDRHALYDKTKKIFLPAKTEEDIFAHLGLDYIPPWQRNA

SEQ ID NO: 712 - protein, 362 aa, Artificial Sequence
  Modified TdT Sequence
MENLYFQGTVSQYACQRRTTMENHNQIFTDAFAILAENAEFNESEGPALAFRRAASLLKSLPHAISSSKDLEGLPCLGDQTKAVIEDILEYGQCSKVQDVLCDDRYQTIKLFTSVFGVGLKTAEKWYRKGFHSLEEVQADKAIQFTKMQKAGFLYYDDISAAVCKAEADAIGQIVEETVRLIAPDAIVTLTGGFRRGKECGHDVDFLITTPEMGKEQLLPDLINLLEKKGLLLYYDLVESTFDKTRLPCRKFEAMDHFQKCFAIIRLKKELAAGRVQKDWKAIRVDFVMPPADNFAFALLGWTGSRQFERDLRRFARHERKMLLDRHALYDKTKKIFLPAKTEEDIFAHLGLDYIPPWQRNA

SEQ ID NO: 713 - protein, 362 aa, Artificial Sequence
  Modified TdT Sequence
MENLYFQGTVSQYACQRRTTMENHNQIFTDAFAILAENAEFNESEGPCLAFRRAASLLKSLPHAISSSKDLEGLPCLGDQTKAVIEDILEYGQCSKVQDVLCDDRYQTIKLFTSVFGVGLKTAEKWYRKGFHSLEEVQADKAIHFTKMQKAGFLYYDDISAAVCKAEADAIGQIVEETVRLIAPDAIVTLTGGFRRGKEIGHDVDFLITTPEAGKEQLLPRVINLLEKKGLLLYYDLVESTFDKTRLPCRKFEAMDHFQKCFAIIKLKKELAAGRVQKDWKAIRVDFVLPPVDCFAFALLGWTGSRQFERDLRRFARHERKMLLDRHALYDKTKKIFLPAKTEEDIFAHLGLDYIPPWQRNA

SEQ ID NO: 714 - protein, 362 aa, Artificial Sequence
  Modified TdT Sequence
MENLYFQGTVSQYACQRRTTMENHNQIFTDAFAILAENAEFNESEGPCLAFRRAASLLKSLPHAISSSKDLEGLPCLGDQTKAVIEDILEYGQCSKVQDVLCDDRYQTIKLFTSVFGVGLKTAEKWYRKGFHSLEEVQADKAIHFTKMQKAGFLYYDDISAAVCKAEADAIGCIVEETVHLIAPDAIVTLTGGFRRGKEIGHDVDFLITTPEMGKEQLLPRVINLLEKKGLLLYYDLVESTFDKTRLPCRKFEAMDHFQKCFAIIKLKKELADGRVQKDWKAIRVDFVMPPVDNFAFALLGWTGSRQFERDLRRFARHERKMLLDRHALYDKTKKIFLPAKTEEDIFAHLGLDYIPPWQRNA

SEQ ID NO: 715 - protein, 362 aa, Artificial Sequence
  Modified TdT Sequence
MENLYFQGTVSQYACQRRTTTENHNQIFTDAFAILAENAEFNESEGPALAFRRAASLLKSLPHAISSSKDLEGLPCLGDQTKAVIEDILEYGQCSKVQDVLCDDRYQTIKLFTSVFGVGLKTAEKWYRKGFHSLEEVQADKAIQFTKMQKAGFLYYDDISAAVCKAEADAIGQIVEETVRLIAPDAIVTLTGGFRRGKECGHDVDFLITTPEMGKEQLLPKVINLLEKKGLLLYYDLVESTFDKTRLPCRKFEAMDHFQKCFAIIKLEKELAAGRVQKDWKAIRVDFVMPPIDNFAFALLGWTGSRQFERDLRRFARHERKMLLDRHALFDKTKKIFLPAKTEEDIFAHLGLDYIPPWQRNA

SEQ ID NO: 716 - protein, 362 aa, Artificial Sequence
  Modified TdT Sequence
MENLYFQGTVSQYACQRRTTMENHNQIFTDAFAILAENAEFNESEGPALAFRRAASLLKSLPHAISSSKDLEGLPCLGDQTKAVIEDILEYGQCSKVQDVLCDDRYQTIKLFTSVFGVGLKTAEKWYRKGFHSLEEVQADKAIQFTKMQRAGFLYYDDISAAVCKAEADAIGQIVEETVRLIAPDAIVTLTGGFRRGKEIGHDVDFLITTPEMGKEQLLPKVIDLLEKKGLLLYYDLVESTFDKTRLPCRKFEAMDHFQKCFAIIKLKKELAAGRVQKDWKAIRVDFVMPPVDNFAFALLGWTGSRQFERDLRRFARHERKMLLDRHALYDKTKKIFLPAKTEEEIFAHLGLDYIPPWQRNA

SEQ ID NO: 717 - protein, 362 aa, Artificial Sequence
  Modified TdT Sequence
MENLYFQGTVSQYACQRRTTMENHNQIFTDAFAILAENAEFNESEGPALAFRRAASLLKSLPHAISSSKDLEGLPCLGDQTKAVIEDILEYGQCSKVQDVLCDDRYQTIKLFTSVFGVGLKTAEKWYRKGFHSLEEVQADRAIQFTKMQKAGFLYYDDISAAVCKAEADAIGQIVEETVRKIAPDAIVTLTGGFRRGKECGHDVDFLITTPEKGKEQLLPDVINLLEKKGLLLYYDLVESTFDKTRLPCRKFEAMDHFQKCFAIIKLKKELAAGRVQKDWKAIRVDFVMPPIDNFAFALLGWTGSRQFERDLRRFARHERKMLLDRHALYDKTKKIFLPAKTEEDIFAHLGLDYIPPWQRNA

SEQ ID NO: 718 - protein, 362 aa, Artificial Sequence
  Modified TdT Sequence
MENLYFQGTVSQYACQRRTTMENHNQIFTDAFAILAENAEFNESEGPALAFRRAASLLKSLPHAISSSKDLEGLPCLGDQTKAVIEDILEYGQCSKVQDVLCDDRYQTIKLFTSVFGVGLKTAEKWYRKGFHSLEEVQADKAIQFTKMQKAGFLYYDDISAAVCKAEADAIGQIVEETVRLIAPDAIVTLTGGFRRGKECGHDVDFLITTPEMGKEQLLPKVINLLEKKGLLLYYDLIESTFDKTRLPCRKFEAMDHFQKCFAIIKLKKELADGRVQKDWKAIRVDFVMPPVDNFAFALLGWTGSRQFERDLRRFARHERKMLLDRHALYDKTKKIFLPAKTEEDIFAHLGLDYIPPWQRNA

SEQ ID NO: 719 - protein, 362 aa, Artificial Sequence
  Modified TdT Sequence
MENLYFQGTVSQYACQRRTTMENHNQIFTDAFAILAENAEFNESEGPCLAFRRAASLLKSLPHAISSSKDLEGLPCLGDQTKAVIEDILEYGQCSKVQDVLCDDRYQTIKLFTSVFGVGLKTAEKWYRKGFHSLEEVQADKAIHFTKMQKAGFLYYDDISAAVCKAEADAIGQIVEETVRLIAPDAIVALTGGFRRGKECGHDVDFLITTPEMGKEQLLPRVIDLWEKKGLLLYYDLVESTFDKTRLPCRKFEAMDHFQKCFAIIKLKKELAAGRVQKDWKAIRVDFVMPPVDNFAFALLGWTGSRQFERDLRRFARHERKMLLDRHALYDKTKKIFLPAKTEEDIFAHLGLDYIPPWQRNA

SEQ ID NO: 720 - protein, 362 aa, Artificial Sequence
  Modified TdT Sequence
MENLYFQGTVSQYACQRRTTMENHNQIFTDAFAILAENAEFNESEGPCLAFRRAASLLKSLPHAISSSKDLEGLPCLGDQTKAVIEDILEYGQCSKVQDVLCDDRYQTIKLFTSVFGVGLKTAEKWYRKGFHSLEEVQADKAIQFTKMQKAGFLYYDDISAAVCKAEADAIGHIVEETVRLIAPDAIVTLTGGFRRGKECGHDVDFLITTPEMGKEQLLPDVINLLEKKGLLLYYDLVESTFDKTRLPCRKFEAMDHFQKCFAIIRLKKELAAGRVQKDWKAIRVDFVMPPIDNFAFALLGWTGSRQFERDLRRFARHERKMLLDRHALYDKTKKIFLPAKTEEDIFAHLGLDYIPPWQRNA

SEQ ID NO: 721 - protein, 362 aa, Artificial Sequence
  Modified TdT Sequence
MENLYFQGTVSQYACQRRTTMENHNQIFTDAFAILAENAEFNESEGPALAFRRAASLLKSLPHAISSSKDLEGLPCLGDQTKAVIEDILEYGQCSKVQDVLCDDRYQTIKLFTSVFGVGLKTAEKWYRKGFHSLEEVQADKAIQFTKMQKAGFLYYDDISAAVCKAEADAIGQIVEETVRLIAPDAIVTLTGGFRRGKEIGHDVDFLITTPEMGKEQLLPKVINLLEKKGLLLYYDLVESTFDKTRLPCRKFEAMDHFQKCFAIIKLKKELADGRVQKDWKAIRVDFVMPPADNFAFALLGWTGSRQFERDLRRFARHERKMLLDRHALYDKTKRIFLPAKTEEDIFAHLGLDYIPPWQRNA

SEQ ID NO: 722 - protein, 362 aa, Artificial Sequence
  Modified TdT Sequence
MENLYFQGTVSQYACQRRTTMENHNQIFTDAFAILAENAEFNESEGPALAFLRAASLLKSLPHAISSSKDLEGLPCLGDQTKAVIEDILEYGQCSKVQDVLCDDRYQTIKLFTSVFGVGLKTAEKWYRKGFHSLEEVQADKAIQFTKMQKAGFLYYDDISAAVCKAEADAIGCIVEETVRLIAPDAIVTLTGGFRRGKEIGHDVDFLITTPEMGKEQLLPKVINLLEKKGLLLYYDLVESTFDKTRLPCRKFEAMDHFQKCFAIIKLKKELAAGRVQKDWKAIRVDFVMPPIDNFAFALLGWTGSRQFERDLRRFARHERKMLLDRHALYDKTKKIFLPAKTEEDIFAHLGLDYIPPWQRNA

SEQ ID NO: 723 - protein, 362 aa, Artificial Sequence
  Modified TdT Sequence
MENLYFQGTVSQYACQRRTTMENHNQIFTDAFAILAENAEFNESEGPCLAFLRAASLLKSLPHAISSSKDLEGLPCLGDQTKAVIEDILEYGQCSKVQDVLCDDRYQTIKLFTSVFGVGLKTAEKWYRKGFHSLEEVQANKAIHFTKMQKAGFLYYDDISAAVCKAEADAIGQIVEETVRLIAPDAIVTLTGGFRRGKECGHDVDFLITTPEMGKEQLLPKVINLWEKKGLLLYYDLVESTFDKTRLPCRKFEAMDHFQKCFAIIKLKAELAAGRVQKDWKAIRVDFVMPPVDNFAFALLGWTGSRQFERDLRRFARHERKMLLDRHALYDKTKKIFLPAKTEEDIFAHLGLDYIPPWQRNA

SEQ ID NO: 724 - protein, 362 aa, Artificial Sequence
  Modified TdT Sequence
MENLYFQGTVSQYACQRRTTMENHNQIFTDAFAILAENAEFNESEGPCLAFRRAASLLKSLPHAISSSKDLEGLPCLGDQTKAVIEDILEYGQCSKVQDVLCDDRYQTIKLFTSVFGVGLKTAEKWYRKGFHSLEEVQADKAIHFTKMQRAGFLYYDDISAAVCKAEADAIGQIVEETVRLIAPDAIVTLTGGFRRGKEIGHDVDFLITTPEMGREQLLPRVINLLEKKGLLLYYDLVESTFDKTRLPCRKFEAMDHFQKCFAIIKLKKELADGRVQKDWKAIRVDFVMPPVDNFAFALLGWTGSRQFERDLRRFARHERKMLLDRHALYDKTKKIFLPAKTEEDIFAHLGLDYIPPWQRNA

SEQ ID NO: 725 - protein, 362 aa, Artificial Sequence
  Modified TdT Sequence
MENLYFQGTVSQYACQRRTTMENHNQIFTDAFAILAENAEFNESEGPALAFRRAASLLKSLPHAISSSKDLEGLPCLGDQTKAVIEEILEYGQCSKVQDVLCDDRYQTIKLFTSVFGVGLKTAEKWYRKGFHSLEEVQADKAIQFTKMQKAGFLYYDDISAAVCKAEADAIGQIVEETVRLIAPDAIVTLTGGFRRGKECGHDVDFLITTPEMGKEQLLPDVMNLLEKKGLLLYYDLVESTFDKTRLPCRKFEAMDHFQKCFAIIKLKKERAAGRVQKDWKAIRVDFVMPPIDNFAFALLGWTGSRQFERDLRRFARHERKMLLDRHALYDKTKKIFLPAKTEEDIFAHLGLDYIPPWQRNA

SEQ ID NO: 726 - protein, 362 aa, Artificial Sequence
  Modified TdT Sequence
MENLYFQGTVSQYACQRRTTMENHNQIFTDAFAILAENAEFNESEGPCLAFRRAASLLKSLPHAISSSKDLEGLPCLGDQTKAVIEDIIEYGQCSKVQDVLCDDRYQTIKLFTSVFGVGLKTAEKWYRKGFHSLEEVQADKAIHFTKMQKAGFLYYDDISAAVCKAEADAIGQIVEETVRLIAPDAIVTLTGGFRRGKECGHDVDFLITTPEMGREQLLPKVINLWEKKGLLLYYDLVESTFDKTRLPCRKFEAMDHFQKCFAIIKLKKELADGRVQKDWKAIRVDFVMPPVDNFAFALLGWTGSRQFERDLRRFARHERKMLLDRHALYDKTKKIFLPAKTEEDIFAHLGLDYIPPWQRNA

SEQ ID NO: 727 - protein, 362 aa, Artificial Sequence
  Modified TdT Sequence
MENLYFQGTVSQYACQRRTTMENHNQIFTDAFAILAENAEFNESEGPCLAFRRAASLLKSLPHAISSSKDLEGLPCLGDQTKAVIEDILEYGQCSKAQDVLCDDRYQTIKLFTSVFGVGLKTAEKWYRKGFHSLEEVQADKAIHFTKMQKAGFLYYDDISAAVCKAEADAIGRIVEETVRLIAPDAIVTLTGGFRRGKECGHDVDFLITTPEMGKEQLLPKVINLWEKKGLLLYYDLVESTFDKLRLPCRKFEAMDHFQKCFAIIKLKKELAAGRVQKDWKAIRVDFVMPPVDNFAFALLGWTGSRQFERDLRRFARHERKMLLDRHALYDKTKKIFLPAKTEEDIFAHLGLDYIPPWQRNA

SEQ ID NO: 728 - DNA, 1488 bp, Artificial Sequence
  DNA Sequence
atgctgcatattccgattttcccgccgattaagaagcgccagaagctgccggagagcagaaattcctgcaaatatgaagtcaagttctctgaagttgcgattttcctggttgagcgcaagatgggtagcagccgtcgcaagtttctgaccaacctggcgcgtagcaagggctttcgtatcgaagatgttttgagcgatgcggtgacccacgttgtcgccgaggacaacagcgcggacgagctgtggcagtggctccaaaattccagcctgggtgatctgtccaaaattgaagtcctggacatttcatggttcaccgagtgtatgggtgccggtaaacctgtgcaagtcgaggcccgtcactgcctggtcaagagctgtccggtgatcgatcagtaccttgagccatccacggttgaaacggtcagccaatatgcgtgccaacgtcgtacgaccatggagaaccataaccagattttcacggacgcatttgccatcctggcggagaatgctgagtttaacgagagcgagggtccgtgcctggcgtttatgcgtgcagctagcctgctgaaatcgttgccgcacgcaatttctagcagcaaagacctggaaggtctgccgtgcctgggcgaccagacgaaagccgtaatcgaggacatcttagaatacggtcagtgcagcaaagttcaagatgtgttgtgtgatgaccgttaccagaccatcaaactgttcacgagcgtttttggcgtgggcctgaaaactgcagagaagtggtaccgcaagggtttccactctctggaagaagtgcaagcggataatgcgatccatttcacgaaaatgcaaaaagcgggcttcctgtactatgatgacattagcgcagcagtttgtaaggctgaggcccaagcgatcggtcagatcgtcgaagagactgtgcgtctgatcgcaccggatgcgattgtcaccctgacgggcggttttcgccgtggtaaagagtgcggtcacgacgttgactttctgatcaccaccccggaaatgggcaaagaagtgtggctgctgaatcgtctgattaaccgtctgcagaatcagggtattctgttgtattatgacattgttgagagcaccttcgacaaaacccgtctgccgtgtcgcaagttcgaggcaatggaccattttcagaagtgctttgcgatcattaagttgaagaaagaactggcggctggccgtgtgcaaaaagactggaaagcgatccgtgttgatttcgtggctccgccggtcgacaatttcgcctttgcattgctgggttggaccggtagccgtcagttcgagcgtgatctgcgccgctttgcgcgccacgaacgtaagatgctgctggataaccatgcactgtacgataagaccaaaaagattttcctgccggccaaaaccgaagaagatatctttgcgcacctgggcttggactacatcgatccatggcaacgcaacgcgtaatga

SEQ ID NO: 729 - protein, 355 aa, Artificial Sequence
  Modified TdT Sequences
TVSQYACQRRTTMENHNQIFTDAFAILAENAEFNESEGPCLAFMRAASLLKSLPHAISSSKDLEGLPCLGDQTKAVIEDILEYGQCSKVQDVLCDDRYQTIKLFTSVFGVGLKTAEKWYRKGFHSLEEVQADNAIHFTKMQKAGFLYYDDISAAVCKAEAQAIGQIVEETVRLIAPDAIVTLTGGFRRGKECGHDVDFLITTPEMGKEVWLLNRLINRLQNQGILLYYDIVESTFDKTRLPCRKFEAMDHFQKCFAIIKLKKELAAGRVQKDWKAIRVDFVAPPVDNFAFALLGWTGSRQFERDLRRFARHERKMLLDNHALYDKTKKIFLPAKTEEDIFAHLGLDYIDPWQRNA
